United States Patent Application Publication US 2026/0357256 A1 - sequence listing, part 18

SEQ ID NO: 9 - DNA, 58617616 bp, Homo sapiens (residues 36,907,392-39,078,414 of 58,617,616)
  source 1..58617616: mol_type = genomic DNA
ggtgctagtaatgttctatttatcgtcctagtagtggtttcaccattctcaatttcaccatactatgcaatcatagtcatgcagttttatgtgtgtatgttatacttcaattttgttttcaagtaagaaataatcaaatgtttgataaatgaaagaatgagcttttaaatccagaacaaactggtcaaagatgttaaatagctgaaagtagataaaatgaaaacaagcacagggaaagaaaaagacacacatgcacttacatctatttctcagggtgggaatgtctactgttatacaaatctaaacgtagcgtatcataggaaggaatgaaactaaaatgtgactagaataattatagcataattgtagccagggaggtacttgctatattggactagggaaaaagtatgagaaaaaaaaaaaaagtgggatagcttatatggaagaggcttcaggcctttaaagggagcttcctgataacatctcagaagtatatctctttatagccctgctcctgagccatcatctcttacttacctgaacacaggcctctagtcagctctctatcaaccatccagggctcttttccttgttccaataaggagatcacagctggcttagaattggaaagtcctgttcacaagaaaagacatgggacatggttatgctgtggggtccccagaaatcagatccagtcccttagtgatcaaaggagagatgccactacaagaaggaccggagaaagatggagaagatgaagcttcagccacagcccattggagctgcccacttccaactcttccattctattttaactcaaaccattccttagggaacagggagcagaaattcagctggttacatgaagcaaataattcacaatggagaaaggagacacttccaagggcacactctgaattttggggaatagttatccttacccactgaaaccaggttgctgaaattctccaacatcacttctttgtataaattcatctgatcagcgtccaggcattcccattcctcttgagagaagtctatggaaacatccctgaacatcaccggcccctgaaacaacaaacatgctttcacaatgaaaggagaaaagaaaaagatggcggtagaggtggcaagaaaggacagagtaagcaaaattaaagggggtgaatcctatcatatcagaagatatacgtcctgtgtacaaagggatatacaaatagactggacttttccagtgatatgaaatagcatgcattcagctcaattagtgagtttcttccccctccccgctttccctttatgccccaagagaggggaaaatgggaggggctttcaaacacaccttataatacatggagtaaaaattcagaatatcaggggaaaacaaaaatgaaagtttctaaaagcttccagaagaaaacacagatcacataagttttcagaaatcagaatggcaatagacttctcaatagcatcatttgaaataagaaaaaaccaagcaattcctttaatattataaaggaaaataaattctgacctagaattctatagccagtcagattactaagccactatgaagattaaatcaagacaattttaaatctgcagggaatgataaaagtacttccaatgtggcttttcttaggaagctactaggctacatgttccatcaaaactaggtagtaaattaggaaaaagaaaaggtactatattaagaaactgtaaaactaacatgaaaatggtgatgaaagtgccagtataattataaaaggcaaatcctagaacatcatccggcagcagactgagagaacagcatctaggaacagaagaagtgaggactataggaaagacatctccaaagaaaactaaggagctagtatgtttcatcatgtagaaaatattgacaggcaactgacagcaatgttagagaatttgaaaaaaatagtgacacatacataaaaccgggcaaaagaagaaacaaggcaatttcctctgagaaaaatacaaattgtattagaaagaatccagaatctggtgttttacttggctcacattgtctgcaaggtcctaatgtctgcaacaatgtctgcaaggtcctaatcacagggatagcaatgattgaaagaaaaattatgagccgagcatggtggctcatgcctgtaatcccagcactttgggaggccgaggcaggaggatcaccaggtcaggagttcgagaccagcctggccaacatgatgaaaccccgtgtctacttaaaatacaaaaattagctgggcgtggtggtgcacgcctgtaatcctagctactcgggaggctgaggtaggagaatcacttgaacctgggaggcggaggttgcagtgagccaagattgcgccactgcactccagcctgggcaacagagtgagactctgtctcaaaaaaaaaaaaaagaaagaaagaaaagaaaaattgtgatataattctattgcatggacaaaaaatgaagactgtggtatgggaaatctcaatccatagttacctgcctagaaatcactggaaaatatgtatcaaaaaatagcaatataggaatattaattagaaatataggaaaaatgctaagagaaacagcaaaaagagtagccacctaaggggagtaggattgggttagtgggacaatgccctgccatttttcatgtcttttaacatttcttgaaaaattttttttttttttgagacggagtttcgctcttgttgcccaggttggagtgcagtggcacaatctcggctcactgcaacctccacctcccgggttcaagcgattctcctccttcagcctcccgagtagctgggattacaggcgccggtcaccacacccagctaatttttgtatttttagtagagacagggtttcaccatgctggtcaggctggtctcaaactcctgacctcaagtgatccacctgcctcagcctcccaaagtgctgggatgacaggcgtgagccaccacgcctggcccatttcttgaatttttaaaatgcgaaatgggttaaacataaatttaaagtatcacttagacaacagcatactttaagtttcttggaaattacaattcttataagactgtcataattattccctattaacataaacaaattcaacttttatacccttatggtagcagaaatttccacaatataaatactactgaatgaatctttcatttcagacattttcttaggcaaaaatacttttaagaccttttccagatatgcaggcccttccccataccttgccctatgcatctcttccattttgctgttccttagttgtatcctttgtaataaaactataatcaggccgggtgcggtagctcatgcctgtaattccagcactttgggaagccaaggggggtggatcacctgaggtcaggagtttgtgaccagcctagccaacatggagaaaccccatctttactaaaaatacaaaaaatagccaggtgtcgtggcgcatgcctgtaatcccagctactcagaaggccaaggcaggagaattgcttgaacccgggaggcggaggttgcagtgagccgagattgtgccgttgcactccagcctggacaacagagtgaaacgccatctcaaaaccaacaaacaaagaaaccaacaaaaaagtaaaactatcatcataagtatagtgctttcctgagttctatatgttattctaatgaattattgaacctgaaggagagttacgggaacctctaaatttttggctggctaggcagaagtgcagtgccttagacttgtggctggtgtctgaagcaggtacagtcttgtgggactgagtcttttttttttttctttgagactgagtctactccatcacccaggctggagtgcagtggtgcgatctcagctccctgcaacctctgcctcccaggtttaagcaatgcttctgcctcagcctcctgagtagctgggaccacaggcacacaccaccacatccagctaatttttgtatttttagtagagatgtgggttcaccatgttgtccaggctgttctcaaactcctgacctcaagtgatcctcccatctcggcctcccaaagtcctgggattataggcatgaccagctgggactgagcctcttaagcaatggggtctatgttaactctgggtagtgtcagaattcagttaaactataggacactcagttagtgtcccaaaaattttgtttataaaaggacacacattcccaattgataggagaaatgagggtacttctccctcaccttaggacaagcaagggggcccctttagactccagggtccaaagtggaatgatgagatactttggaataatttttgctgtattctctggagcttagggggcacaaagattagtacctatttccctctttggactagatgtggacccaataaagggacaaagtgacctcaacaaaggaatggatcacagaatgcagaagtgtatgacagatgtcataagtagccatttcaagaagacatgctgtgcatatcccaggaaatgcaattagaggtttccagcaggggcttctctgagagactcttaatagtgtctcctaacaaaggagtgttgaacatccatcaaggcaaaagagatcaacaccaaaacaagtcaagaaagacttttcttttccttacctcctcttccctacccctgctctaatctcataggatccagagactgacttaggcaggagaaatagaagctcagggcgaggaaatcaagaagcttaattatgtcccttttcatactttgcaagcttgaagcaattctcagctcagagaagaggctttaaatgaaactcacatattattacagtgaactagaggttgtaattagtaaaatgagactagattttgactgaaaacaatcaaaggacatcaaagagtgataaaaattatagtctataccagttcttatccagggcaacaaaaaaattaacccacagagagggttgagagtagaaattatgaggaaaaagtttttcttttgcttgcttcatatggaatcctgcttatttcaaaatgctgatcacaagcagatttggtttttcagttacacagtcacatcatctataaagcgataatcttatgccctcttttgtaatttttaacctaattttttttcttatgtaagtgttttggttaatatctataaaacaatgttaaataacattggtaatgtggtatatccttgttttacttctaattttcaaatattttgatgtttcaaatatttcctgattaaacattagattaagttctgaaaacaaattttatttcttttaaaatttattgtcccccgggcacagtggctcatgcctgtaatcccagcactttgggaggccgagatgggcagatcacctgaggttgggagttcaagaccagcctgaccagcatggagaaacaccgtctctactaaaaatacaaaaattagccgggcgtagtggcgcatgcctgtaatcccagctactcgggaggctgaggcaggagaatcgcttgaacccaggaggtggaggttgtggtgagccgagatcatgccattgtgctccagcctgggaaacaagagtgaaactctgtcccaaaaaaaataaaaatttattgtctactacagtatactacatgtccctagttattcccgttaatactgggcaacaatcttctctatagaaatgagaagtgtaactagagactgatgcaagaggggaagcagatattctatttgggctttggcacaggagagggaagactcagtcctctttaaaagaaattcagatagaaaggccttacacaaaatacttagttagacttattcttatcctgattttctctgcatctgtaccaaacacatacaatttaaaaattgagagtaggcccactcagagttccaaatttacaccttgagaaaacattgtcactattctgagtcctctatcctagtatgtatcctctaattttcagataaaatgattacctggtgaatggataaccttacaatttagtgagttccccaagattagaagtgttgaaacacaaactgaataaagatatttttattattacttggaggaagaatccaaaaactctgtaattgcctgccatgcccactgccccctcctgagatgaggcaaggttcttttgtttgctttgatttcagctataagtatcaactctaaaaaccaaaaagagataagacacagaaaagaagaagaaattctaacatatgtttagttagaacctgagaaggaaagggggagagaatgatacgggggctttttgaaggtataatgactgaagattttcctgaactaataatagatatccatccataaattttaaaactctacaaatcccaagcagacaaataaaacacatttatatatcttacactaaaattacagaaagccaaaaacaaaacagtcagaggaagacaaggcagattaccatcaagggagacgagctaatcaagactgtatgatactggcacaggaatataaaaaatcagtggaagagaataaagagttcataaacatacccatgcacatatagacactaggtatatttgaagaccaatgagaacacaatagaccttccaatatatggtattgataaactgggtattaataaggaggggggaatctgactcttacctcataacatatacaaaaaccagttgcaactatataaaatatctaaacatgaaagtgaaacttatggctttaagcataaatataggagagtatctgcatgaccttgggacagggaaggatttatttaaaaagatacaaaaagcactaaccataaagaaaaaatattgataaactcagctttttaaaaattagaacttatcataaaatcatcttacaggaaatgatgaaatagtccaaatagtaggaaaacaatcaataaaggactgagatccagattacataaataactcatacgaatcaataagagctattccaagagaaaaatgagtaaagatttgaactgacatgtcacaaaagatgactaaaaaccaataaacatatggaatatgttcaattttattattaatcacggaaacccaaattcaaacctgtgggggtgggcgggtataagtacagatatatattcaaatgaggatttaaaagtctggcatgtctgatttgtatatcatagtttttgcaaacatcaaaaatgtatttcccaagaccatttgatgacatgggagaatatttctgacacttctttttgcaaaaatgtagaacatcaaatggtaaatgaaataaaatttggtttttgacaaataatgaaaatacattaaaatattaaccctagttatctgagtggctaaattttattttttcttggtaatgctgtgtttttgagatctctaaattaatcatccttttatttttaaatcagaataaatatttgagaagaaaattcagcaagcataagtggagcaaccatccttttctgtgatgggaaaattatagggacctataattaaatgacattcctttaagcaagaattttcagaagaaaaagaggaaaccccaacacaccttggatactgcttgtagaagttcatcatgcattctttcctcctcttctgggtgacacctggagaaaggtaaaattgggagagggaagagtaactgtgagacaccaggtttttcttggtacccagattagtcaagtaagagttcttccccagccccattacccaccacacatgaggaatggagatcagaggagaatggggcattctgtccaattccagtggctcaggggaaaggttgtgttcactgctgtccagggttggaatctgaccagacctcagagaggtttcctagagacagagttctggagtcacaatcgcatagttgacaggaccccatactcatacacagaatgccacatacatttagggacagtcacacttaaggcgacatgcacgtctcacctgcccacaaggagccacacacggcaacacagttacaatcacatacacaccataggaaacacacaattacagctgcacaatcgtaggcaccccacactgtcgcagagtcacaatcacacatcaccacgggaacacacagccacaacccccacagtgacaggtatcccatatccgcacataagccgcagtgttattatctcccagacaatttcacaacctcccctctttttttgggggggtggggtggggtggggacagagtcttgccctgtcgccaggctggagtgcagtggtgcgatctcggctcactgcaacctccgcctcccgggttcaagtgattctcctgcctcagcctgcgagtagctgggattacaggcgcgcgccaccatgcctagctaatttttgtatttttagtagagatggggtttcaccatgttggccaggatggtctcgatctcttgacctcgtgatcctcctgcctcggcctcccaaacacaacctccacctttcaggccgctccgcccgcaggggcccaaggcgccagctccccatcggtcttcggtatcctcacctaagccctttccagtcatcccggatgggaacttgcagacctgagccagttctcctggggaccaaaatatctcacctcccagatctaagggtcccgccaggagtgacgaaacgttcgaattcctgcgagaaaagtggcaggccaccaggccctctgggaaatgtagtccagagcgggacccacgccgattcctgtcagctcctcgcctgggcccacccgaaacggctgctccctcaactctcaacatccagccgagcctcggagttgcgggtcgccgtagcgctgcgcaatggagatgagcctcccggggaacccggcccaagcctcaccctcacacaggaaagcagatgtgttctggccggaagttgagtggggccgcggggcctgctgggaggtgttgtcctcggaaacgtcgctggcgcggagggatggttcggcgctttaggcgtctgtcacagacctatctgcgggtcgccttcacccagcatctcagaaactgcgcgcgggatgaacattcgggtgtttccggcaggtgacgctgccgagtccccgcagcagggggcgagcaagggactcgcggttgacgggacacggatcctctaaggcccagagtgtcccgagtagcggcagtggggagtgctcagggtacgctaatggtgagtggttgcagttgatgggacaaaaaactgtgatgggagttagtgtgggtgtgtggttgtgtgtgtgagtgtgacggcacgaataatctgatggggtgattgtgatatttggttgcgcgggattatgatgaaatgtgtgatatgtgtgtgattatgattaaggctgtagcgagtgtgaacgtggcgaagtgtgcgtgattgtaatatgtctagtagttcttgtcttgagctggcttttctgtagcatttggcacagttggtaacggcttgaaaaacacttatttgttttctactgatcctccctccttgttggccactcctctgtagtcttctttgctgtcttttttaccctagtagcccttggccctttgtaattttccactattccttggcgaacttttcaggttcattattatcttatgacttgctgcttttatgtatgttagttagctattgccatgataataattatgtctaaaaaccacccctgaactcaatgccatacaacagcaagtccttactctcctgttcacaggcttgcgcattgactgtgttcagctgatctaggtggggcttggctgagtggataggctgcgtgacgagttaagatctgcgccgcatgtgttctttcagggtctcaggccaaaaggacatttgttgccagggcatgctctgctcctgatgggtcaccagagcgcaagagagattgcctcaaccagagcaagtcacatggctaagcctaaaatcaattatgcccacagttggagagcaaagttacctcgcaaagagtatgaataataatctattagagggtgtgaggaattggactaaaattccagtctaccaccttaagaaacatacctctttatcctggtgaatgccttttagtccgggttctcttttgtctgataatattgcttttcaagttttattgtatttcttaagaatttcattttctaacccccttgtgtctttatgtttcagatctgtgtcttgtaaagagcatattgctgggcttacatccgtttatcttgtttgactgttattttaataggtgagtatagttcagtggcatttatcatgattgctcataaaaaatgttttattttctattacgccttaaacatttttgattgacatataatagttgcacatatatctttttttattgtgcaaattcaccttatccctttttctcccctaggttggtttctgctattatccttttttaatatgcatgcttaacaaaactcaaccttaagactttaaaatacttgaactccaaaatatccaccaatttctgtgttattcttgtctcatatattattttcttctagtttttgttgttgttgttgttttgttttgtttttttgagacggagtctcgctctgtcacccaggctggagtgcagtggcacggtctcggctcactgcaaactccgcctcccgagttcaagcgattctcctgcctcagcctcccgagtagctgggactacagacgcgccaccacgcccggctgattttttgtatttttagcagagacagggtttcaccatgttagccaccatggtagatctcctgacctcgtgatttgccgacctcagcctcccaaagtgctgggattacaggcgtaagccaccatgcccagcctattctcttctagttttaaatccccaaattagtagtagtagctcatttattctatatacagttcgtatccaggaggggttggtttcaagaccccccatggataccagaatccacagatgctcaagtccctacatccttctttatacattaaatcatctctagattatttgtaatacctaatataatgtaaatgctgtgtaaatcattgttacacgttattgtttagggaataatgagaaaaaaatctgtactgtacgtgttcagtacagacacaactgtagtaggcctaactgtattttttatctgaggctgattgaatctgaggatgcagaacctgtggataaggaggaccaactatgtatacacacatgtatatttaattgtggtaaaatacacaacatagaatttaccatctaaaccatatataagtgtacagttcagtggcatgaagtacattcacattgttatggtaccgtcaccaccatccagccagagaactcttcttcttgcaaaacagaaacccagtacctatcaaacaataactctgtacccccctttcccccggcctatggcatctaccattctactttctgtctctgaatttgactattctaaatacttcatataagcagaatcatatgttgtttgtgcttttgtgaccctgatttaacttagcataacgtcctcaagattcatccatgttagcatgtattggaatttcctccttttttaaggccgaatgataagtatgtcatatatggataaatattttgtttatcaatttattcatcattggacacttgggctgcttctaccttttggcaattgcaagtgacactgctacaaacatgggtatacaactatctgagtccctgctttcagttttttatatatacatgtggtaatgtctgtttttaatctttgattgtcatagtgttttcgataatgactgaaccattttatcagcatatttttgagcacctactatgaatatcaaaaacagacaaaaataagtccttgttttcatggagtttatgttgaggggggtgggtggacagtatatataactaaattatagtcatgtgccatatatgtatggactatatacatacatgacagtggtcctgtaagacagtggtccccagcctttttggcaccagggagtggttttgtggaagacaatttttccagggactgggggatgggagggttatggtttcaggatgaaactgttgtccctcaaatcatgaggcattagattcctataaggagcaagcaacctatatccctcgcatgcacagttcagaagagggttcacactcctgtaaggctgtaatgccaccactaatctgatagaaggtggagctcaggcggtaatgctcactcacctgctgctcacttcctgctgtgtggcctggttcctaaccaggaaccagtactgtaccagtaccggtacgtggcccaggggttgaggacccctgctgtaagattataatggagctgaaaaattcctgtcacctagtgactttctagccaatataacactgtagcacaataccattactcatgtgtttgcagtgatgctgctgtaaacaaacctactctgctgccagtcatataaaagtataacataaaattatgtacagtacataatacttggtaatgataataaatatgttactggttcatgtgcctactatactatactttttatcattactttggagcatatgcctatttatttaaaaaaagttaactgtaaaacagcctcaggtccttcaggaggtattccagaagaaggcattgttatcatagaatgtgatagctctgtgtgtgttattgtccctgaagatcttccagtggggccagatgtggaggtgaaagccagcaccaatgatcctggacactgtgtaggcctaggctaatgggtgtttgtgtcttaatttttaacaagaaagtttaaaaagttaaaaaatttttaagaagatagcttatagaataaggatataaagaaaaaatatttttgtacagctgtacaatgcattttaagctatgtgctactacaagagtcaaaaagttttaaaaaattgaaaagctggctggacacagtggctcacccctataatcccagcactttgggaggccgaggcgggtggattacaggaggtcaagagttagagaccaggctgaccaacatggtgaaaccccgtctctactaaaaatacaaaaattagccgggtgtggtggcagacacctgtaatcccagctacttgggaggctgaggcaggagaatcacttgaacccaggaggcttaggttgcagttagccaagatggtgccattactccagcctgggtgacagagtgagactccatctaaaaaaaaaaaaaaatgaaaagcttataaagtaacaaagttatagtaagctaaggctaattcaacaatttgaagaaataaaaattttataaatttagtgtagcctaagtgtacagtgtttataaagtctacagtagtgtacagtagtgtcctaggcctttgcgttcactcgccactcactcagagcaacttccagttctgcaagtttcattcatggtaagtgccctttaccagtgtaccattttttatcttttatattatatttttaccatttctctcctgtgtttaggtatgtttagatatacaaacacctacctttgtattgcagttgtctacagtattcagtacagtaacatgccatacaggttcgtagcctaggagcaataggctataccatatagcataggtgggtagtaggctataccatccacatttgtgtaagtacacttatatttgcacaatgatgaaattgcctaatgacacatttctcagagcatatctctgttgcaaagtgatgcgtgactgtatatattaatagtttgttagaaagtgatcactgtcggccaagcatggtggcttatgcctgtaatcccagcactttgagaggctgaggccagcagatcacctgaggtcaggagttcaagaacagcctgaccaacatggagaaatcccatctctactaaaaatacaaaattagccgggcgtggtggcgcatgcctgtaatcccagctactcaggaggctaagccaggagaatcacttaaacccaggaggcggaggttgcagtgaactgagattgtgccattgcactccagcctgggcaacaagagcgaaactccatccaaaaaaaaaaaagaaagaaagtgatcactgtcatgaaaaaaagtgagtgtgtgaggggtattaggaggatatctcaagcatagcacttctcaaaacttattataactgaatgttttctgttttatttgttctatcatacagggcaaaaattagtctattttgttacatatattttttttttaccctttacctaataaagactcatagcagctgctaaattaatatattttaatagtcatttcgtatattcatccaatattattgtgacatgagtataattgtcatttcagatgaagaatcttggaattctaaattgcaattctcccttaattcagttgccaagataatacagaaatggaatggaatagctggtctttgaatgaaactctcttttatgccaaatttggggttgctgcaaatctgggtgttttttgactcaggtttacatctgtcacctcatcgagcatacacctttagacacagaagatatctgaagaacagataggtaaacatcacttggtttatgcctctggtcagtgtgtccagagtgtatgaattacaaataaggaagattagtgtttgaggctatattatctattagtgtgtaacaaattacctcaaaaactagtggcttaaacaacaataaacattatctcacaatttctgtgggaagtgtcttcactgcgtatttgggcttgggtatctcatgaagttgcagtcaagttgtcagccgggctgcagtcatcagaaggctgggctggggctggagggttcacttccaagatagctggcttccaagttagtgttagctgtcaacaggaggcctctccctagggctggttgagtgttgtcatggtatggcagctggcttccctcaacatccatgatccaaatgtgcaagacagaagccctaatgtcttttataacctaaccttagaagtcacacaccatcatttctgcaatatcctattggttatgcaggtcaaaggtactcatggtgggagggatctacaaaggcatgaataccagaagacggtggtcactgggggccatcttggaagctggttatcacagggagccagtgagaaggcaccaggtaaattagatttatatcctaatccacaggtcctggttccacaaggataaaacacatctgcagtgcaaatagaagtctgaggaacaggtgtcttatcatggaaggagacctgacctgagacctgccttagaggctggagagtcctgaaagagagtggaccctggagttgctggagcttgtcttgacccttctgcccagagcaggcagggtctgaatgacatctcaatcttcagtgatcagcaatagctgtgtgacaatggagcgtttgagccacatgatggaaaggaaaggtgaggtggctcataggtggacagagcttaggagagaaaggctctacatttggggacagtgaaaagaaattcattactcctactgagaaaggtcacgtatgttaattgactaggcaggggagacatttgtttttaatcatattcatttgactatttgattttttaaaataaattttgaaatgcaatttttatttcttaagagtatgtttaagtatatctttaaatgctgtactataacataaacaaaagcttcctattccatccatcctggttccctgtccccattcctgaaaggcaaccactttgaacatttttgtctcaatattctggtattcacctccttttttctaaataacattcttacactgctaatgcttcatttctcagttttagatatttcctgttgatttttgataatgaagttaaggatttagctctctttcactacctaaccccttccgtttcatctccaccccaacacactcttctccttgcccttctttctaatatggtattattttttggaggttgaaggttgaccagatgtcagcatctgtaagcattttcttttgggctagtcagtttccccagcaagaagtcctagattttgcttgagaagtacaagccagaactcctgctttttgggagacgaaggaagtgagcatgttggacacctcatcttgcaatatgagaactttaattcttttctctctgcattgcttcaaccccacctttatctgcatctggtatgcctgaaattcagagcttgtctcattcagtttatctagagaaataatctttaatttttttctgttgccaatgtgagggaaatgtgactatgccatgttgggtgaaagaaaacatcaggtggttttaacatctttttatgacatcttacattcggttttatgtttttcagccctactcccaaactctagtccacagaagtaattagtagctccattcctgaacctttctagggtcttgtcatggcttccccaccctcctcccaccttcacttaagcttcagctttctctggttaagttagataccactcatttgtctgctctttagcttcccacattttgttgacagctcttatctgtggaaatcttctatattctttgtccttatgagttttagcctccttttttcctttattaacattatgattggtttgggagagagtggaaatattaataaatgcaggtattcaggcttttatttttaaccaaaaggccctgaattttttagggtaaaaaataaatcaagttttttaaaaatgtcattagaaacatgactgtattgcatcctatcttatcaatgttccacattacctatagccagtctctgatgaaggtttttttctaaattattttttttgagggggagacagagtctcgctctgtcgcccaggctggagtgcagtggtgtgatctcggctcactgcaacctgcactttccgggttcaagcgattctcctgcctcagcctcccaagtagctgggactacaggcgcacgccactacgcccagcgaatttttgtatttttagtagagacagggtttcgccatattggccaagctggtctcgaactcctgacctcgtgatccgcccgccttggcctcccaaagtgctgggattacaggcgtgacgaccgcgcctggccctaaattttttatggttaaaaaataacattttaggccaggcgcggcgtcacgcctgtaatcccagcactttgggaggccgaggcaaatggatcccttgaggtcaggagttcgaaaccagcctggccaacatggtgaaaccccttctctactaaaaatacaaaaaagttagccaggcatggtggtggatgcctataatcccagctacgtgggaggctgaggcaggagaatcgcttgaacctgggaggcagaggttgcagtaagcagagatcaggccactgcactccagcctggacggcagagtgagactccatctcaaaaaaaaaaagaaaaaaaaattttaaagatcatcccaatctttaaatttttggggtaactattattatgtacttaagataaacttcctgttagaaataaaacagcaagattctagggagataaaatattgccaatagattcattgggcactgcatacttagccctccataaatccccatcagaccccatatgattaaattagccatctgtgtccatttcagtgtctatagctagatggcagttaacatttcttattgcttcaaggatcattcatctgtagagggtcttctagccacctggtactgaagatttctatattcctttgtctgaaactttgaagcaaatctgtttcatttctcttccctcagcttggtgttctcaagagtctgccctttccgaggaagaagaggatacaaccaggcctcttgtacgtcttaagcatttatttgtttcctgcattattttgcagtgcagttacggtgggttcttgtaacctaccaatgtgttggaaaaaataaattgatgaaaataaaagtgagaaaaaatacagatagaaaatcagaacctggggaaatttgagatatggctatgcagaagcaggtacatacagaattattaaagttgagttcaaatttaaatatgatctggacagtcaaagcaaactgggacacttaagtttattccgtaagtccataagttgcaccatttatgaggaaaaacttacaattatttaagtaaaaggcttttaactggcaccttgttcaaaaagaaactctaaaatatagttggacttctgtatctgtagattctgcatccatagattgaaccaactgcaaatcaaaaatacttgaaaaaaaaatgggtggttgtatctgtactgaacatgtacagacttttttcttgtcgttttctaaacaacatagtgtaacaactatttacatagaaatcacattatattaggttttataagtaatctagggacgatttaaagtatacgggaggacgtacattggttacgtacaaatcctacaccattttatataagggacttgagcatcagtggattttggtatccgtggggggtcctggaaccaattctacatggtttcctagggacgactgtaattccttaattcttacaatttttagcttagcttttagaagttggtcttggccaaacttcaaaaattcaaattacctggaagagtaagtggaacacatatctttcaaatgatcctacgtatatattttcttcaattgagtttttaatccaagttgagctaaattatactaatattctatggcagaatcttatagttctgatatccatagcttttcacatcttttttatggtctcagaagatatagtcttcatcctcatcttacaaaattacgtattctctgctcttgattctttttgtttccacctctgaagtcactcacacacctatattttgaatgttttctgcttaactgcctctttttcttcagcttatgtctttcacatcatgaaatatacacacatacttcttttgaccatatgatcatatggctcatccagttacttctgttggcgcggtggccctagcaaacctctctggccctcgacaggcttgagtttaaatcttggctcagtgacttatgaagtgcatgactgtggacaagtttcttaatctttttgtgactcagttacatcatctgtaagtctataaatggggatgataatggtatttatcccacaggaatgttgggagggttaaatacatgtaacaagtaccccataaatgataggcattgttatttttttctcaaatatttttggtctgccattggttgaatccatggatattgaacccacagatatggagaaccaactgttacagctttattgagttcttactatgtgccagatgtattgtgctttacatagcttatttcatgtaattattatcagacgtctatgaagtacatattatttaaattttttaagataagggaaatgaagcacagaggttaagcttacataacatcgtgcatcaatgtgtcataaacccaggattcaaatccatacagtctgactctagggcccacactctacgatactgtacagatggaggctcattatgagtgaagaaatacaaaagccaattacccattcatattgtttgtctattttgtaataatagttttttctgtattcgaaattagaatattttaagaatgtctatttcagtattaggacttaggatttatgcagctaccttctcccaatctgtcatttttatgttatttattttttgttgtatagacattgaagtttggatagttacatttagtgtatgataaatatgtatacataatagaattcagtcaaaatatgcaactattaatatttagtagtcttttctcatgagttgccaatgttaatcttttctaagatatctttcctaattaatattagatcatagagataatctctgttcaaagcattgttttccatatttagtctttaatccaactggattataatattgtaattggtttgagataggaatttactgataattctattagtagaattatctttgcatgtagaagaccagttgttccaacaccgtttattaagtagatctttcctttgtgatgccacctttactgtatacatacatgatggtttctaggcttttactttttctgtaatctatttgtctacatttatatcagtactgtactttgtgtgtgtgtgttttacattggtttaattacaattactttatatgggcaatgatttcaccacttctttatgcacacacattattcttagtttttcaaaaatttttcagctactttgggacctctgggcttccatttgaattttagaattagtttatctagttctaggaagaaatcctattggggatttccattgaattgcacaactagttggagaagaattaagcaaaaaatacatatatataaaaaatatataaatatatatatatataaagatatatgtgtgtgtgtgtgtgtatatatatatatatatatatatatattatatatatatatatattttttttttttttttttttttttttttggtgatgaagtcttgctttgttgcccaggcttgagtgcagtgacacgatcttggctcactgcaacctccacctcccgggtttaagtgattctcatgcctcagcctcccaagcagctgggattacaggggtacaccaccatgcctggctaagtttttgcatttttagtagagatagggtttcgccatgttggccaggctgacctcaagtgattctgacctcaagtgatccacctgcctcagcctcccaaagtactaggattgcaggcatgagccattgcacctgtcccgaaagatattttctgtcacaattaaagatgtttccatttaagggaatctattaatataaattattatattcaagagaaaaacaatcagatctatagagctgaaaatttttttaactcagaacctgtgatttcaaaaggacctatttataaagtaaaagtaaaagaacattttcttatgatattttaagaaattattcacacgcatacaacacatatatatgtgcagataataagctacaagctagtaccatgtttacttgtaaaaattaggcactttcctactagtcaggaacacaaccagcttgccagtgctactactacgattttgtatgcctagacataagtaaggggagggaaatgaagtaaaaagcaggatggtgcattcaaaattatgatatctaagtgatacaattatgtttttaggcaacagaagagaaacacaagaatgattgaaatatggacacaaaattaatatacaaaaatcaataccatttttctctataaaccacaccatcaaaaatgaaatggaagaatgatgctcagactagaaaaaaacccgaaagaaaaaaataaaatgtatgtggtgtacatgggagaatgaaaccttcaaattattactgagatagaggatttgaacaaattttttaaatacccttttttggataagagccatcattattaaattaatataaattgtctttaacctacatagattgatcagaatctcaataacaattctaaattatttttcttagaattagacaagtttatttgagccgagtctagaatacatttgaaaaataaaaacatgcagaatggccaggaaaagtataaaagaatgtcatgtgccatgctctaagtttttaaaagaagaatatttgtttaatgcttacataactttagggaaaaaaaaattttataaaaagttgccagtcaacatatacacccagaactgacttgtagttatctttattccctcactgtaaactttgttattttaaacaattatattctattatgtatcttaaaagtgaagaaagcgaggcatggtggctcacacctgtaatcccagcattttaggaggccacagctggaggatcacttgaggccaggagtttgagaccagctggatcaatacagcaagacccagtctttacaaaaaattttaaaaaattagctgggtgtggccaggcgtggtggctcacgcctgtaatcccagcactttgggaggctgaggcgggtgaatcatgaggtcagaagatcgagagcattctggctgacatggtgaaaccccgtttctactaaaaatacaaaaaattagccgggtgtggtcgtacacacctgtagtcccagctacttgggaggctgaggcaggagaatcacttgtacccaggaggcagaggttgcagtgagccgagatcgcaccattgcactccagcctgggcgacagagcaagactccgtctcaaaaaaaaaaaaaaaaaaattagctaggtttggtggctcacatgtgtagtcccagctactcaggaggctgaggcaggaggattgcttgagctcagcagtgagtcttcagtgagctatgattgtggcactgctccagcttaggtgacagagcgagacccagtttcaaagaaaaaaaaaagtgaaggagaggaaggtgctgtggtaccagcaagaacattggaaatattattgcctcttgccaggggcagaagcgtgttcatgtttttttttttttttggttctgtttgacaggagaaggaataaaacttaatgacatgaactgtgaatttatgttttttaaggttcgaacccctatgtttcttgctattaatactgaatttcttaacatttgtatgtgaagagaatcaacatcttgggaaaatagaccctattgtaaagactgactcatcattttatacagtcaaaaattaaagcatattttacttcttggtattttgttacttatggcttttgtcagggatgcaatttcttttttttttttttgagacagagtctcgctctgtcgcccaggctggagtgcaatggcacaatcttggctgactgcaagctccgcctcccaggttcacgccattctcctgcctcagcctcccgagtcgctgggactacagacgctcgccaccacacccggctaattttttgtatctttagtagagatggggtttcaccatgttagccaggatggtctcgatctcctgacctcgtgatccgcccgcctcggcctcccaaagtgctgggattacaagcatgagccaccgcgcctggccaggggtgcaatctttttatatgagatttatgctaagttactagagttggtgggaaaatgtttttgtgctgatttgttagcactaatttaaaaaatgttttctctttttgtagttttcccctatctttgttgtggtgtatattccagagggattatctatttctgaaacattcatcagttgattattgtgtcaagctctgttctgagtcacatttactgtgttatttagtcttcacatcaaccctttaaggagaattccactttatagatgaggaaactgagactcaagtttggctatttgtcaaggtaacacaattagtaaattttgaagccagagtttgaacccatgacattggataccacagcctattaactggtaaaaaatatctaaacccagctccgttttgaaagtttagtatttcagcattttttttcagtcagaaatgtgtcagtcacatgtctgttcagcctttctgctgcttttgtgaatagaaaacaggcgttcattcttatccttggggtctgcaggttaactatgtgggcatctctgctttgggctgcagatcagctggccttggcttaggctccacagtgggcttgtgtctgctctgcatatattcattctgagtttcagctgaaatggcacagcttcctgggccaaggtcttcatttgctgtctcactggagcacatgagccaaggtaaagggtgtaagcaaatttcaggcctttgctcacatcatgtttactgacattccttttgccccaacaaagggctcagacaaggcccacattagtagatgggacattagtacaggcaggaagtgaagactcgctgaataatcaatttatcacagtaatattttctaatggaattattttttgttgagtttgtttttgagaccaggacttgctgtgttgcccaggctggagtacagtggcatgaacttggctcaggtgatcctcccgcctcagcctcccgagtagctagatgataggcatgtgccatcatgcctggctaatttttttattttttatttttcgtagagatggagtctcactatgttaccaaggctgttctcgaactcctggcctcaagcagtcctcctgcctcagcctcccaaagtgctacgattataggtgtgagctactattcccagcttcactgagattttttaaactttaaacatattgaaatatagtcttataacttaaaaaaactttattaacatataagtcacatactataaaattagcccatttaaagtatacaagtgagtggtttttagtgtattcacagagttgtgcaaccatcaccataatcaatgttagaacattttcatcaccctgaaaagaaaccctttacctgttagctttcacttcctgttttcccttaaggctctgatgtaggcaagaataaatgatttctagctctatggatttgcctattttggacatttaatgtaaattgagtcatatgataaactgttatcctttgtgttgcctttcgcttagcattatgttttcaagtttcatgcattttgtagcttgtacgagtactttttatttctgaataatattctcttgtagggatataccacattttctttattcattgattaatggaaatttgattcatttccccttttaggctattatgaataatgctgataagaacattgatgtacaagtttttatgtggtcatatgttttcacttctctgaagtttgtacatagaaatgaaattgctagatcatatggcaactctatgcttaaccttttaaagaattgccccactgttagccgagtgcaatggctcatgcctgtaatcccacactttgggaggctgagatgggcagatcacctgaagtcaggagttcaagacccacctgaccaacatggtgaaaccctgtctgtactaaaaataaaaaacaagtagccgtgcctggtggcacatgcctgtaatcctagctacttgggaagctgaggcaggagaatcacttgaacctggtaggcagaggttgcagtgacccaagaccacacaccattgcactccagcctgggcaacaagagcgaaactccgtccccagaaaaaaaaaacagaattgccctactgttttccatagcagttgtgctagtttacattcccaccagctgtgtatgaggattccagtttctccatcagcacttgttcttatctgtcctttggttatagctgtcctagtgggtgtgaagtaaagctcatgagattttgatttacacgtactgtataacttgtgatgttgaacaccatttcctatgtttgttggccatttttattaatatatcttctttgaagaattgtctattcagagcctttgcccacttctaattggtttgtcttttgattattgaacttttaagaggtctgtacatattcaagtgtcatcagataaatgatttggaaatattttatcctatcctctgggttgtcttttcactttcttgatgatgtccttagaagcacaaaaatttttagttgttctgatgtccatttttatttaattttcttttgttgcttgtgcttttggtgtcatatctaataaaccattgcctaattcaattgaaggtcataatttacaactatgtattctgagaccttttttttttttttttaagctcttacagctagatctttgatccattttgagttaacctttgtatacggcatgatccaccttcattcccttgcatgcagacagtccagttgttgtcccagcatcatttgttgaaaagactattctcttccctggtgaagttttttatcaccatttattatgatgtgggggttttgtagttgccctatatcatgttgaggaagttcccttcttttgcttatttgctaatttgttggatgttgggttttttggttgttgttgtttgtttgttttcaatgataaaagggtgttggattttgttgactactttttctgcatttacggagatgatcttatggtttttgacctttattatattggtatgatgtattacattaattatcagatgttaaattaatattgcattctgctggggtaaatcctacttggttatggtccataatactttttatatgttgttggattaggtttgttagcattgaggatttttacctctctattaataagagagagtgggctctagtgtttttttggggggtggtgcgtgtgtgtgtgtgtatgttctttgtcaggttttagtattagggtaatacttgcctcataaaagatgtgtcccctccttttattcatcctctttgttttggaagagtttgtaaataagttagtattaatttttttgttgtttgttaaaattcaccagtgaagccatctaggcctgagtttttcttttgggtaggtttttttttttgttttgtttttttgttttttttttttttttttagtaattcagtctcttgttacaagtcttttcatcttttctttttgttgcagtttaatcagtttgtgtctttctagaaattcattcatttcatctactctagtttgttggcatatatttattcataatatttctttgtattcctgtttatttctgtaagattagtagtaatgtttcttctttcattcctgatttttgtattttgagtcttcttgtcagtgatatttgtccattttgtcaatttttagttttattgattctctctaatgtttttctagtctaaatttctttgatttccattctgatgtttgcttatttccttttagttactttggatttagtttgatcatcttcttctagtatcttttttttttttttttttaattgaggcagagtctcactctgtcacccaggctgaagtgcagtggcatgatcatggctcagtgcagccttgatctcccaggctcaggtgatcctgccacttcagcccggtcccctaagctcccagtagccgagactactggcatacaccaccacgccctactaagtttttgtattttttgtagagatggggttttaccatgttgctcaggctggtcttgaactcctgggctcaagcaatccgcctgcctcggccttccagagtgccagattatgggcacgcccagccctcttctagtattttaaggtagaaagttagtttattgatttgaaatctttcttcttttttaataaagtgtgtacagctataggtttccctctaaaacttgctttaatggcattccataagttttggtatgttgcaccctcattttcttttacctcaaagtattttgtaatttccattgtgattttgttgatccattggttatttcagaatattgtttaatttttacatatttttgaatttcacaaatttctttctgttagtgatttctaatttttgcccattgtgatcaaggaacatactttacacaattctcttaaaatttattgaggctttttttttttttaagagacaggtctggctgtgtttccctggctgaaattcagtagctgttcacaaacataattatagttcactatagccttaacctcctgggctcaagtgatcctcttgcctcagcctcctgtgtagctgggcctattgaggcttcttttatagactaacatattttctatcttggagagtgctctatacacttgagaagaatgtatattctgttgagtggtgtgttctataggtgtctgttagatctggttggtatatggtgtttgagtcttctattttcttgcttataatctgcctagttgtatccattattaaaagtggtgtttgggctgggttcgggggctcacgtctgtaatcccagcactttgggaggctgaggcgggtggatcacgaggtcaggagttaaagaccagcctggccaagatggtgaaaccccatctctactaaaaatacaaaaattagccgggtgcggtggcaggcgcctgtaatcccagctactcaggaggctgaggcaggagaattgcttgaacttgggcggcagaggttgcagtgagccgagatcgtgccactgtactccagcctaggcgacagactgagactctgtatcaaaaaaaaaaaaaaaaaagtagtgtttggagtctccaaaaattattgttaaattgccagtttctgccttcaattctgtatttttgctttaggtattttaagactgttagatgcatatataattgttatatctttctgccagattgacccttttatcattataaaatgtcctttagtaacagttttgttttaaattctattttgtctgatattagtatatccactctagctttctatggttgttcgcatgctgtgttttttccatcactttattttcaagctatttgtatatttgaacctaaaatgtatttcctgtagacagcatgtagttgaattctgtttttctatccaatctgacaatctgtccttttttttggcctgtttaatccattcagagttaatggtaacactaaaattattgggctatgtctgccattttcctttttgttttccatatgtctcatgtcattttttgtttctcctttactgctttcttttcactaagcaaatattttccagtataaaattataatttctttaatgatttttcactatattttcttagtggttgctctaggacttggatactatgtatcttatcagaacctacttcagatttatactaagttccattaagatatggaaatgttggtcttatgtagctctattccctcttcccttgttttgtactattattgttatatatgttacagactcaacccattattataattactactgcatataatgttgcatcacttaaagaagctgagaaaagagagcaaatatgtattatgtttattatattaaccttatttaccatttgtttgtgttgattcaagttctagtaaatcttgtgtcattgcttactctattccaaatttgctctgaagattctctctttatctctggttttcaacatttttgctatggtatatctgactgtgggcctcttacatttattttacctggagttcattgagcttcttgaatgtataatgttttttgtcagatttgggaaatgtccaaccattatttctttgaatgttttttctgcacctttctctcttcttcttctagtactcctacctctgacccctgagtaccagctaaacaagttcttgtatgttgtgatcacaatgcctaattttgatgacttcaaattaattagcattatgtttttacaggaaacagtgacatttaaggatgtggctgttgaccttacccaggaggagtgggagcaaatgaaacctgctcaaagaaacttgtatcgagatgtgatgctggagaactacagcaacctagtcacagtgggtaaggtggcttggtagccttgcaatttaacagagaattcttttccatttctgaaatgtgtgaagactgtaacttgccagatgaatctagcctttcctttctccatgtgactatatgtgctccactcttcagtgttaaaggctgattactttgtgtcattgtgtaagttcattcatcctcatcttttataagccctcaagcttggacttagcctaagatctgaatggttgtctccagcattgacatccacatcctttgctatttcttgtaataggctgtcaagtcaccaaaccggatgtgatattcaagttggagcaagaagaggagccctgggtgatggaggaagaaatgtttgggaggcactgtccaggtgaataagtgaaaagcagctctgaatgagaaagccacatgagagttgttcagtgaagggttgatatcatttcacaatttccaagattttcttaaaggccttattcttctagagtgacaaatgggatggagtgctttagattactgtgacatttctaggtattattcttcctattttgcagatattttcctcttttaaattgtagagggccagtagccctatccaatttcataataccaaccttccctaattcattcacagcttcactttcaggattattgttcctctctctatgatcctcgggcactctctttcctttatgtttatggtttcattttcttatgcattcagtatttcatggttgtgtagtaattttaaaacatgtttcacacttaggtttcttttcatttctttccttctttcttttttaaaaagccttagatttgtgtttggttaacaatagtttcacttcccattgtgcttcacaaccctcacaatcccatggcttagaaatgtaaaagtttctggcttagaaatcccatggcatctcctttctgcttattcctgccttccattcctttaatttttttgaaactacatgaggtccatccttggttgaaaagatataaccaatgtaaccaatattatacctataataccaatattataccttttgtgcaaaagtaaatcttcctcttatcctggacatggtcccttcctttccacagttgcatacacttcttttttggagttatcctggctatttttgattatttattttaccatatgaattttagactaaactgtctatttccagagaaaaacctgttggaatttttattgggattgtgctaaatatataaattaactttcagaaatttaacatccttttaatgccaatgttttctgtctaagaacacacactgtctttgttcagattttcatatctacttctgtgtcctttagaaatggagctttccaagttttcccattgttgcttttatacatttcactataataatgggtaagaaagctataaaaccatccttatttacagataatgagattgtatccctagaaaacacaagcaaaccaattgagaaagtacaacaaatagtaacagaactcagtgaggtggtaggatatcaaattaacaaagaaaaatcaatagctttcatatatacttcaacaaccaagtagaagatactaaggaaagaaaactacatttatagtagtaagaacaaagatgaaatactcttctgggcatggatatataacagtataccaaacaaaatcctgtctttatgagcttataatttaatggaaactagagtccctgaggttttgcatatgggaaaatatctttttaacctttacatttggttgatagttggctgtgtgtaaaattcttgaaccatactttcttttccaaagagttttacagacagttacctgagggatttagacaattctctgttgtttcctagattcaaatgttgcttggagaagtctgaagcctgattatttcccctcataggtgacttattttccaggatgcctataggtttctttttctttaaagcttaagtggctttatgaggctatgccttggaattgatcaatcagtatcagtttttcctttcagcttgtggattcatgatttttgttccttgaaatgtcgtcatatagatttcatgctcgtttcttttgtggttatcattgtcatctttcgatgaaggtatttcctgctgtagccactgtttacagaaggatagtgttgaagactgtccagaaaaatactctgagttggtaagaagtctctatacctcacactgacctcctttatcatacaaggttttgtgttgagagttggtttaccctttcattctcccaagttaaagagagattattatttgcatacttcctctagaactcagtgtctcttccatcttcctatgctaacaaactgcttatataagaatactggctgtttgcatctctttgttcagccctgcctttgtaccatttgtcagggccagatgaagtccattctgtacctgccacaatttcaagacatctggcaaaaaaatgactcattcattctgcccacaagggggtgcctctgttttagagaactctgttccctgtactttttgttggagataagaaacaggaactgctatctctgggtttcttccctgcctaatccagtctattttctgttctttcctcctattctggggatggagtttagctatctttaaggttcattgaagatgtattttctttctttttttttttttttttttttttttgagacggagtctcactctgtcatccaggctggagtgcagtggtgcagtctcagctcactgcaacctccgcctcctgggtttaagcgattcttctgcctcagcctcccaagtagctgggactacaggcacgcgtgaccatgcctggctaatttttgtatcttttagtagagacggggtttcaccatgttggccaggctggtctcgaattcctgacctcgtgatccgcccacctcggcctcccaaagtgctgggattacaggcaagagccactgcatctggccagaagatatattttctttttctgtttcttcttcatgtttgcagagtgaagaggagacagagatgtttaattctaccatattgaaacaggaagtcctctatgctgtatttgatccatttcacccttcttggaaatgtctttcttctttgtgcttctctaaaggattcaaattcttccttggttctggtttattgtttatttcttcttcccttgtgaaatatcttttacatgacttctttctcatctctcactggacatcacccaaagtagttctgaattacaatagacttctttttcctcagagtaccttcatgctatatctgtgttcatgctattaaataggtatttaactctagaaatgacagcattggaatatgtatctttaatgcctccagaattttgaaactcttcatatctctgccattaattatgagtgctcttacctaagttctagcagttatttaactttaatatcattttctaataaatggtcctcaatatttccagcctacattggtcttgcccatctctcaactaacattctattacacgtctaccagagtggttggaatctgaaaacatatactatcttctacatgttttcatattttgatgtctaacacttgtttattagtccacctggagaaagaaaacttttattcttcctataaatgagtcatgattgatgtagagctatatttgggaagatttttcttatttttggttgttttaaaatatttacctacagatttcaaaataaacgtggaagaaatcaggctagagttagaaagacagggcatagtcacatgagatagtgttgaatgttaaattgcatgtgaagtgtctatttagtaaatgagtaaaccagacaacacctagaaagttttaagagaagggctgtagaaggagtaacaagattgaggctttctttttctttttgataagagcttggcattgaagccattttcctgtaagatctatagcttatttagacttattaaaaattagaaaacataacaaaatgtttggaaagtaaaattagcgtgtctgtttggggggtaaaattagaaacatggcctgattagaggagagaagattgtaagagattagtgaaatcaaggatgagttttccattgtagagtcagaaagttctgaattttgctagcattcatgttctcttttgctgtcttttatttttaaaattttgttgtcaatttagtttattttttcccctctttaatcactgaagctatagttttgccctgtgcatggtggcagcaaggttacaatggtcaattataagcaggggtttataagataaacagaatatgaaggttaaaacacatctagttatctgaattttaagttacccacagctgatggaactccaggggcgtggaaaaccattgtagaactaatgatgtaggaatgttatcattttgggtgatggtatgaaagaaaaaagtcaaaacacaatggaatttgatataaaggcagtttcagtgtggagaaataaacataggataagatgataggacctgctgttaacacactgtggtgaatcaaagatggcttgcctcctgatcagctttatactttttattcaataaaattagaccttcctatttctaatatgccttgttctttaagcacatataaaaatgaatcacaattagatggaaagttggagctctctccatatttattaccaattttggatcgtatttagtttggacagactaatcttcaagtatgtttagatagaaataaaggaatttgaactttatgaaaattaatttgcctgtggtatgcagactgcacaaaagatagacttgtcaggatcatgacagttaatctaggcaaaagtaatgagaacttgggttatcatttgtttctcttaacctaatgtagctgttattatttctcatgccatttctttcccttttaatatgcatttttagttttttcaaagtataccttatacattacttgttttagagagccagtagaaatgtcagattatagcagtgctgtgctctgacctcacatttcacctcctttagtcaattatttttgactttttttaactatctcttttgttgtcgacctacgtattttgaaacaaatgtttatactgctctgtaaatttttttttttttttttgagacagagtcttgctgttgttgcccaggctggagtgcaatggcgtgatctttgctcactgcagctctgcctcctgggttcaagtgattctcctgcctcagcctgccaagtaactgggatcacaggcatacaccaccacgcccggctaattttttgtatttagtagagatggggtttcaccatgttagtcaggctagtctcgaactcctgactcacctcggtctcccaaagtgctgggattacaggcgtgcaccaccgcacccagtctgtaaatgtttctgtagtcattttcaaacataagaatagagagataaaggagctggtcgcggcagctcacgcctgtaatcctagcactttgggaggccaaggtgggcagattatgaggtcaggagatcgagaccatcctggctaacatggtgaaaccccatctctattaaaagtacaaaaaactagccaggcgtggtggcgggtgcctgtagtcccagctactcgggaggctgagacaggagaatggcgtgaacccaggaggcagagcttgcagtgagccgagatcacgccactgcactccagcctgggtgacaggaccagactccgtctcaaaaaaaaaaaaaaaaaaagaagaatagagagataatataaggaatcctcatgtattcatcactcagcttcaacagttaccgacattttcttagatttgtttactctgtttctctcttacccccactccagttttgttttgtttttttgctgaactactttaccttttcttttaaatactaccatatgtattgccaagagatttgtttaatcctgcaatatttctaacacacctaacaacattagtaataatttcttactatcatcttctacttagtctctgttatatatttcattgtgtcaagaatgttgtttatggttggtttatttgaatcaggatccaaataaaatctgcacattcttagttcacagactatacaaaagcaggctgtgggtatagtttgccaacccctgctctagatgtaccttattctggatttgccatttgacctccttgtggtggtgtttgacatgcttctttatcccatttttcctataatctggctttattcaatgcagattcaaatctttggcaagtatacctcataggtgatgctgtgtacatcctattgcatcttatgtcagtttgtcccacttacagacataattgagattgatcagtagattcatgtattgtcaggccaaatcctcctatttcagtgatctctgtcaacctttcacttaagggttttagcacctattgaccatcatagcctagatccattattttattgagcgtctttcacttttattagctgaaattctcccaaagagaaaaactctctcattaactatttgattgcactgaaatacagtttctcaggccaggaaaaagaaatactctttctcttcaaaagcttttagaataatgattggtgtcctagaggtttccaaaatttgtcaagttaaatcattataaatttatgtaatttgagcatcagaatatattataggcatataaatatttttcatatattattattattataatattgaagacagagtcttgctctgtcgcccaggctggagagcagtggtgtgatcttagctcactgcaacatccgcctcccgggttcaagcgagtctcgtgcctccacctcccgagtactgggattaaaggtgtgcgccaccacacctgtaatttttgtatttttaagtagagattgggtttcgccatgttggccaggctggtctcgaactcttggcctcaagtgatcagcccgctttggcctcacaaagtgctgggattacagtcatgagccaccacaccaggcccatatattaatactcaaattgtctcatcttgagcaagagggatctttagttaatcttgtaagtttcccgctccagacatggaaatagccatttctttaaaaacttttgcctcttttagcaggaaatgatattgtggagactgcagtctgaggattatggttgctctttaatactgagttattggttctatagcttttaagtggacagagctaggaaaaatgcatcttttaaaaagaaaaaaataggccagtcacggtggctcatgactgtaatcccagcacttggggaggttgaagcaggcgaatcacctgaggttgggagtttgagaccagcctgaccaacatggagaaaccccgtctctactaaaaatacaaaattagttgggcgtggtggtgcatgcctgtaattccagctactcgggaggctgaggcaggagaattgcttgaacctgggaggtggaggttttggtgagccgagatcatgccattgcactccagcctggacaacaagagcaaaactccatctcaaaaaaaaaacaaaaaagaaaaagaaaaatatatatgaattttagatacatccaattaaaattaaaaagtatagtgcccttttaccttttatgctgaaaatcttggctcctcattacatgtttatttccttaattcatatatatttctcacccttgacactattgacattttgggccagataattctttgctctgggggactgccttgtgtgttgggggacgtttagcagcatgcctgcttctactcactggataacagtagcgccatccctctttctccccatcatcttcccagttgtggaaaccaaaaatgtctgtagaccttccagacattgcccagtgacccttaaggagtaacactgattaatctatcttctttctttatatattaatttcaaattaacagtaatgctaatattactaataataaaaagacaactaaacgtaatttaagatgtcttttgagttttcttccttagaatatattctaatagggatatatagtcaaactactatgtttaaggttacttgaagtaattttctatgtgattatgaccctcatttgataagtaggcttgtttccaatttttttctatttttagggattgctttggcttttttcttttttgatttaatttttattttttcatatgtaaaatatgtacatgattttattgtcagaactctaaagttacagtcagagaagtcatggtttcagtacatgtaagtgaaaaaaactcagcgtagagaacattgtttagaatatactctcttttatgtgcaaatggatgggaagagagacagagagagaagtgtgtgtgtgtgtgtgtgtgtgtgtgtgtgtgtgtgtgtgtataaaatatatattaaaaatacaattggccctcggacaacatgggtttaaactgcacgagtccacttacatgctgattttcttacacctctgccacccaagacagcaagaccgacctcctcctcagcctactcagtgtgaagataatgaggatgaagatgtttaggattatccacttccacttaatgaatagtaaatgtattttccttatgattattgtaataacattttattttctctaagttattttattgtaaaaatgcagcatataatacatatacaaaatatgtgttaatcaactatgttttcaataaggcttctggtcaacagtaggctattactggttaagttttgggagagtcaaaagttagaaacatttgcaattatgtggaggattagcacctcatccccatgttgttcaagggccaactgtacatatgatatatgcgtgtatatgtactatatataaggaaatgtgtgattatatgtgtgtgtgtgtgtgtgtgtgtgtatgtatgtgtgtgtgtttttttaaatagtggaagaataatccaagaactggctgggcgtggtgtctcatacctgtaatcccagcactttggaaggctggggcgggcggatcatgaggtcagaagataaagaccatcctggccaacatggtgaaaccctgtttcaactaaaaaaacgcaaaaaattagccgggcgtggtggtgtgcgcctgtagttccagctattggggaggctgaggcaggggaatcgcttgaacccgggaggcggaggttgcagtgagccgagattgcgccactgcactccagcctggcgacagagtgagactctgtctcaaaataataataatgataacaataataataatccaagaactaataaaaatggttatctatagggcaaagcaggaattggtgtttcagggacagggtggaatctggacttccgctgctgtttggtaatttgtcagtttttatcaacttgatataaatagaagatgaggtttagtagcattaccacaatcacttctcctttccttttcttctggaatatagatacatcacaatttttagctaattcaatttcaccacttactttgttatgattgttgacatattgtttactatgaggcaagaaatgactcttaattaatatacttatataactttttgtcactcctagaattactacttgccttatttttctattttctatgtattattaatttaaatgataccctcaaaattctttgtttaaataaggaatccatcgttgttattagtttacctcattttgatgcatgaagggataaaagggaaattctaaacatcttccaaaattctaaattttaaagaggataaaagaaattttttagtttttttttttgtttccttttttttttttttttttttgagatggagtttcgctcttgttgcccaggctggagtgcaaagttgcaatctcggctcaccacaacctccgcctcccaggttcacgcgattctcctgcctcagcctcccaagtagctgggattataggcatgctccaccacacccaactaattttgtatttttagtagagatggggtttctccatgttagtcaggctgaactcccaacctctggtgatccgcctaccttggcctcccaaagtgctgggattacaggcttgagccactgcaccctgcctgtgttttttttaactagtggactatactgtagaatggttggatcagaacctagaagattttttgtttgtttgtttgtttgtttgtttgagactgagtctcactctgttgcccaggctggagtgcagcggcacgatctcggctcactgcaacctctgcctcccaggttcaagcaattctcctgcctcagcctcctgtctagctgggattacaggcacgtaccaccacgcccagctaatttttgtatttttagtagagacggggtttcatcatgttggtcaggctggtcttgaactcccgacctcgtgatccacctgcctcggcctcccaaagtgcggggattacaggtgtaagccaccatgccctggctgaacctggaagttttgtgtggggccccaaatgccagcatctgttgttccttttaatctttttatctcctatgtgtaggtacatgccagcattcatgaggctaaataacagaaagggattgttgatctcattcatgttagagtgtatggtgaatctaaatcacatgggaactctacatgcagttatgtctaggaaatgtagttttaactgcctcagcctttacgggatggaaaagcatggtgggagactggaatacatgttacttaagcagatccataactcttgccttggtgtgtaactgctccctactcagactttaatcctcttctttttagtcccactcttatcctacccactccacttttttttgagatgaggtcttgctatgtttcccagactagtctcaaattcctgggctttagcaacccttccaagtagctgggaatataggtacagcccactgcatctggttttttaaattaataaacttcatcttttaggctggttttaggttcacaacaaaactgagtggtgtacagagctcatgaaaaagtaccaagtatatggatacccactgcccaggcacacacagccttccccactgtcaacatcttgcaccacagtggtatatttgttaccatcaatgaaccttcattactgttattattatacacattattattacacaaagtccataatttacattagggtcactcctggtgttgtacattctatgggttttggtaaatgtataatgactcagatccattatagtatcttacagaatactttcactgtcctaaaactcctctctcttcctcctgtttattccttcctctcccataagctctggcaaccactgatacctttactagtcatcattttgccttttccagtttggaatcatatagtaggtggccttttccaatgggtttcttttacttagcaacatgcatttaaggttcctccatgtcttttcataacttgatagcacatctgtttttatcattgatgaatatttcattgtctagatgtagcacagtttatccgttcacctagtaaagggcatcttccaagtgttggcaattaggaataaagctgctgtaaatatccatgtgcagatttttgtatggacatatgttttcaactcattggggtaaataccaagcatgattgctgaataatatggtaatagtatggctaattttgtaagaaactgccagactgtcttccaaagtggctgtaccattttgcagtcccaccagcaatgagtgagaggtcctattgctctgcaaacttgtcagcctttgacttagtagttgcagcaggggttttttgttgttgatttttttttttttttttttttttttcagatttcctacatagatgatcacatcacctgtgaacaaagacagttgttgtttcgtttttccttcctaatctgaatagcttttatttccttttcttgttattgcattaggtaggacttctagtacaatgttaaaaagcagtaatgcgagggaacatccttgccttgtgcttgtttatccctaccttttgagcgcctagattctccaattcttgagcctttccagtgatttctggccaaatctctttgttgcttattgtcatttgcatcttcatgatactttgtagctttgctattcagtttatcctaaatgcttctcatcctgcagtattatgttaaaatctcttgttcatctttttttacactcacgtctcctttttcttatggatttaaccctttattccttcactatcattttaatggcattttaggaaggaggaaaaatacatgcattcaagcctgtgtgtttagtcacaaatgttcattttgttctctagccgtttgactccctatcagtcatttttgtgttcaccctttcattttaattattctattcattttgctgatttctgcactatacgtggacgctttaaaaatcagtcaaggctacttggacctacagatgtcagtttttgtctccatatgttttatgtagtagttaacttctcaaaccttaggaactaggaacatttactcttagctttcttttgtattggttgactaggccaacatcaaagattaaaccccacattagcctatttctgatatgttattaatagtctagtggtagaataattcacaagtaataatttctggtcctccattttagaagtttgggaagttgatgaacagatcaagaagcaacaggaaacacttgtgaggaaagtcacatccatctccaagaaaattctgataaaggaaaaagtcattgaatgtaaaaaagttgcgaaaatatttcctctgagttcagacattgttacttcaagacaaagcttctatgactgtgactcacttgataagggtttggaacataatttagacttacttagatatgagaaaggctgtgtaagagagaaacagagtaatgagtttgggaaaccattttaccattgtgcatcctatgttgtaaccccctttaagtgtaatcagtgtggacaagacttcagtcataaatttgacctcattagacatgagcgaattcatgctggagagaaaccttacgaatgtaaagaatgtggaaaagccttcagtaggaaggaaaatcttattacacatcagaaaattcatactggggaaaaaccgtataagtgtaatgaatgtggaaaagctttcattcagatgtcaaaccttattagacaccacagaattcatactggggagaaaccttatgcatgtaaggattgttggaaagccttcagtcagaaatcaaatctcattgaacatgagcgaattcacactggagagaaaccctatgaatgtaaggaatgtgggaaatccttcagccagaagcaaaatcttattgagcacgagaaaattcatactggggagaaaccttatgcatgtaatgaatgtggtagagctttttctcgaatgtcatctgttacgctacatatgagaagtcacacaggggagaaaccctataaatgtaataaatgtggaaaagctttctctcaatgctcagtatttattatacatatgagaagtcacactggtgagaaaccctatgtatgtagtgaatgtgggaaagccttctctcagagttcatccctaaccgtacatatgcgaaatcatacagctgagaaaccctatgaatgtaaggaatgtggaaaagccttcagcaggaaagaaaatctcattacacatcagaaaattcacactggagagaaaccttatgaatgcagtgaatgtgggaaagcttttattcagatgtcaaacctcattcgacaccagagaattcatacgggtgagaaaccctatgcatgtacagtatgtggaaaagcctttagtcagaaatcaaacctcactgaacatgagaaaattcatactggagagaaaccttatcattgtaatcaatgtgggaaagctttcagtcagagacaaaatcttcttgagcatgaaaaaattcatactggagagaaaccattcaaatgtaatgaatgtggtaaagccttctctcgaatctcatccctcactcttcatgtgagaagtcacacaggggagaaaccctatgaatgtaataaatgtgggaaagccttttctcagtgctcattacttattatacatatgagaagtcatactggtgagaaaccctttgaatgtaatgaatgtgggaaagcattctctcaaagagcatccctttctatacataagagaggtcatacaggtgagagacaccaagtatattaaatgaaagaaggcctcttaaattcaacccatgttttacttaaaatatcttggcataagctcaaaaaagccaggatctttatggaaaaattttaatactttgttaaaaggtgtaagactggaataaatggaaagaaataccatatacatagatggaaaaacccagtattataaaaacctcaattctgaaaatctatagactgaatgcagttccaaacaaaatcaactaagaattttctaggatctttcaaaaatgattataaaattcatgtgaaatagaagtgtatgaattgctgcgacaattttgaaaagaatagaggaaacaccctcactgtatgatataaagttatagtcatttaaaaatgtgtgatattagtacattagtaggtaaatgagcagattttaaagaatagaatatccagaagcagattcatgaatatatgtgaactcagtgtatgttagacctgacatcatgaattagtagggaaatgatgacctagtcaataaaattgctgggaatatttgactctccgtattggagaaaataaaattacaacattacgacatactaaaaaatcaatattcttttttttttttttttttttttgagacaagcgtctcactctgtcgcccaggctggagtacggtggtgcaatctcagctcactgcagcctctgctttccgggtttttttgttttgttttgttttgttttttgtatttttagtagagacggggtttcaccatgttggccagggtagtcttgaactcctgacttcaaaagtgatcgccctctttggcctcccaaagtgctggggtttacaggcttgagccactgcacctggccaaaaaattaacattctaaaggatttaaatactggaatttgaaaagccaaactgtgaaaccattgggagaaaatagatgatattgtctatgacgttgaggccaaggagctttttttttttttttttcaagacaaaaggactctgtaattccacttctaggtatatatacatcctatagaaactcacaaataatgcataagaaatatatatataatatatgtatgtatgtatagccagatgcagtggcacatgcctgtaatcccagctacttgggaggctgatagaagaagataacttgaggtcaggagttcaagaccagcctgggaaacatagcaagaccccatctcttaaaaaaaaagaaatatatagacatatatctgcattgaaaacaacctaaatattcatcagtggggtaatggatgaataaaatatgatatattcaaatgatagaatagtatacagcacttaaaagcagtgaaccagatccatattgtgtaacatggatagttaaaacaatgttgaatgaaaaaaatcaaaatacaaatgaaacattgtgtaataatatttatgtaaattggaatgaaatcatttataaagaacaactgtttctattattgaaaattgtatgtaaaactatttaaaatagaatagaaggatacacacccaattattgatagcattgtctctggagattgaatttgaggctgttgattaaaaggagactttagctttgcttgtagtttttataccttaaaaagactggtagcatataaaataaatcttaaaagctaattatacacaatgacaatatgaatgtttacttgtaatagtgtttttcttgttctttctcacaacaggccaagggaagcctgtgcccatagaaggaaatgttataatggattcatatgccctatcagatgctcaactattttatgaaaaatctctctagaaaattagtaattagaatattcttgtttattatataatgtgaaattagcacattttagcaacttgatgatgctgtgtttttatattttaacatttctgaaattggactcctttcaactgatgatatcttagattcaagtaaatatttaattattaaaaatttgaaaatcagatgccagtataacaaatgaaatgtgtttttatttactagctccgggcatcatgtctactactcacggtgcctgtcctttcagtggagccagtattattagacagcaaatttattaggttcatagctaactaattaccaatatatttagagtattgtggagagattaagatttttcctgggaaagtgactttgcaatatttgttttcttgccctgtaattttccatacaaccagcataggcattaatatcattgttaattataacaatattttgaaatgagaaatcatttatttcctgaggtggccataagcaattgtgtaaaagtgtgttggttttaatctagagaccattttattctttttacaactcttgacttacacagcccatccggttttggttggaaatggtggtgaacttagaccctgagcactaatagtagagttcctcttgaagagtctcattctctgtaataatacatgaaccaacccttacagaggtgatgtttttattatgccatctctacaatattagttgatatacattacagaaagctgctaatgcctttttaaaaaggagatagggccagacgcagtagctcaagcctgtaaacccagcgctttgggaggccgaggcgggtggatcacctgaggtcaggaattcaagaccagtctggtcaacaggatgaaaccccgtctctactaaaaatacaaaaattagccaggcatggggcgggtgcctgtaatcccaactactcagaaggctgaggcaggagaattgcttgaatgcgggaggcagaggttgcagtgagccaagattgtgccactgcactccagtctgcgtgacagagtaagaccctttctcaaaaaaataaaaaataaataaaaaggagataggctgggtgtggtggctcacgcctgtaatcccagcactttgggaggcctaggcgggccgattacttgaggtcaggagttcgagaccagcctggccaatatggtgaaagcccacctctactaaaaatacaaaaattagctgggcgtggtggtgcatgcctgtaatcctagctactcaggaggctgaggcaggagaattgcttgaacctagaggggcggaggttgcagtgagccaagatcacgccagtgcacttcagcctgggcgacacagcaagactctgcctcaaaaaaataaaaacaatacaaaggagataaaaatagggggtgtttgtgaaaagggatctttagcttttatgattgaacattaactacatttgtttgaagttgatttcacaaaagtaaatctcagactaaagatgtgaagtacaaccatgactatcagttttgattgttattaggtatttttgaagactgatggtgacttaacaacagcagggactgacttcagtgaaaacaatgacaacttacccaaactgaaatatctaaatgagtattatcatttcgtagtcccttcttcaataagttttatactaaatccagttttgctagcatacccaatatttatgtgtaaactttttttttttttttgagacaaagtcttgctctgtcacccaggctgcagagcaatggcgtgatcttggctcactgcaacctctgcctccgggttcaagtgattctcctgccttagcctcccaagcagctgggaccacaggtgcgtgccaccatgcctggctaattttttttttttttgtatttttaatggagctggggtttcaccatgttggccaggctggtctcgaatcctgacctcaggtgatccacccaccttggcctcccaaagtgctgggattacaggtgtgagccactgtaccagcctgtaaacctttttctttttttggagagggggtctccctctgttgcccaggctggaatgcagcagcatgatctcggttcactgcaacctgcgcctcctgggttcaagtgattctcctgcctcagcctcctgagtagctggggctacaagctcccgccaccatgcccggctaatttttgtattttcatagagacagggtttcactacgtaggtcaagctggtctgtgagccaccatgcccagcctgtaaacctttttttaaaaaatggttttcgcatttcgtgtatccacacaagtaaccctgtataaatatttgtgagactttttttttttgtctaaacagttgtttttatctgtgattttctttttaatgttttttgtttgtttgtttgtttgtttttggcctgtactttatatgccttaaatcctctgcccctttctttacatagctttagagtcaacagagaaatgtaaaattccacttaaggcccataaggacaaccttagatttctcttttggcctctctcaccccagtaagactggctgaacctatcaggtgaggtaaagtgcctcagagtaggtctaaaagggcgttttactgatcttgtgtcagcaagcagatgatctggtctctgtaaattcattttttccttctgtcctaaggggtagaaataataagatagatataagtgactgagacagactttgaaaaaaatcattaattaaatcatggtgaattcttcttttcctggacacacatgagttactgcctagagagtttccattctagagttcaaacttcataagaggttcagttcctgtgaatggcctcaaaacacacagaataaaacatactaatagtggcttggactagacacagcagtagaaattgatagatttcagatacattttggaggtgattcaacataatgagttcatatgaaagatgaggagtaaagagataaaggataactcctatgtttttatggaaagaaactggctggccggtggaccatttgataaaaatgcagcaggctggggagaaatattttagagtaaaggttggggatggactcaagatgtgtgatggactttcttttcagctgtttcccagaagcaggctttgagatgaggattcctatgcaagtgatttattaaggaagtgctttcagtaagaggggtaagagaatggaggaagcagaataagaaaaagaagtaagtcaagggtgtgatcgcaggcacagtcctgccatggatggtgtcatcctgatccctgtgggaactcgagtgtaagctatgcctcagacttttcaagattccaccttcaggactgaggcacttgtgctgccaacttctgagaatcttggctgctgacaactcacagctaaattcctctaaggaattgctgttggacgaaaggagctgccttatgcaaggttacactgtctcccttcaggcagcttggcccacgttgcctcagtttagagcaactctgaagagcaatcccagctctagagctccccagggaacaaatttcaactgcatcagtttaatttctctttccatccagttctgctttattcatttccttactgctgatgttcccaagagatctccccaataaaccctatcatagatttccatctcagattctcttttcctgggaaactgacttaaaacagtagacattttgcaacagtagtcctcaaattgaaatttaaaaaaaacttttttttttttttgagacagggtgtcactctgctgcccaggctggagtatgtgatgcaatcttggctcactgaaacctctgcctcccaggctcaagcgattctcatgcctcagccttctgagtagctgggattacaggtgtgcaccaccatgctcagctaattttttgtatttttggtagagatggggtttcactatgttggctaggctggtcttgaactcctggcctcaagtgatctgcccaccttggtctcccaaattgctgaaattacaggtgttagccacagcacccaaccaaaaaatatttttgattcatttgaaactaataaactcattacatgttaatacaagcaataaatttttatgaaattattttatgaaaaagaattatttccaaaaccaaaaaacataataagagcgtcattgttacacaactttcaaatactttaaattacttaaaagtagacagctgggttctcatatctgcttctacattcagtcacatgtcatgtaagactgggaaactccattcttactcatgagcaaatgagatcaaaagaaggaaaaatatgaaaatagtttcaatctcaaggccccctagggatttccagactgttctttttttttttttttttttttttttttttttaaatggagtcctgctctgtcgcccaggctggagtgcagtggcgcgatctcggctcactgcaatctctgcctcccgggttaagcgattctccctgcctcagcctcccaagtagctgggattacaggcgcctgccaccatggctggctaacttttgtatttttagtaaagatgaggtttggccatgttggccaggctggtcttgaactcctgacctcaggtgatccgcctcagcctcccagagtgctgggattacaggcataagcccacacgcctggctcaaactgttctttaactgctgttgtgacatttggtgtggtttcttcaaaaacttgatgtcatgggctaaagaggtgtataaacaggaggctaaagggaagcatgggcaagctctctagaagtggtctcagatggaggacttgagaaacaaagaagatggataaggaaaatgttaaatatgtgggtaaatagaaacaaatattggcaggtggaaaagaagagcaagattgatttacagggttttcaaaggccatgaaagtactgggaaacaatggtatataattcagtggattggagtgggtttgatttaaagtatttcaagtctctttactattaaatataaagctaatttttaagattcagattttgaaggattgtaagagacccaaaagattgccttattgagttgaggaagttccctttattcctaagtttgctgactgtttttattgtgattgggtgttggatttttgtcaagtgatttttctgcatctattgacatgattatatgatttttcttctttagcctcttgatgttatgaatgagattaatagattttcaaaggttgaatcaatcttgcatttctgggataaatcccacttgattgtggtgtataattctttttatatattattggatttgatttgctaatattttattgagtatttttgcatctgtattcatgagagatattgttctgtagttttcttttcttgtaatatgtttctcctggttttggtattaggataatgctggcctcatagactgagttagggaatatttcctttttctagaagagagggtagagaattgataaactttcttatatgtttgggagcattaatcagtaaacccatctgggcctgatgctttctattttggaaggttaatagttattgattccatttatttaatagatacaggcctgtttggattgtctgtttattcttggtgagttttgacagattgtgtctttcaaggaattagtctgtttcatgtagattatcaaatttgtgggcataatatgctttatacgcttttattcttgttcataatattctttctttttttcttttttctttttctttcttttttttttttttttttttttgagacagggtctctctttcgcccaggctggagtactgtggcacaatcttggctcactgcaacctccacctcccgggttcaagcaattctcttgcctcagcctcccaagtagctgggattacaggcgtgcaccaccaagcccagctaatttttttgtattgttagtagagacagggtttcgccatgttggccagactggtctcaaactcctgacctcaagtgatcgaacctcctcggcctcccaaagtgctgagattacaggcgtgagccaccacgcccagccaggtggagtctttagattttcctagatataggattatatcatcaacaaaaaggcacaatttgacttcctcttttccaatttggataccttttatttctttctcttgcctgattggtctggctaggatttccattactatgttgaataggagtggtgaaagtcggcattgttccaattcttagtggaaatgctttcagattttccctattcactatggtgttagctgtgggtttgttatatataacctttattattctgaggtatgtaccttctgtgcctagcttgttgaagtttttattgtgaaagcatgttgaattttatcagatgctttttctgcatctattgagatgattatatggtttttgtcctttattctgatgtgatgtatcatgttaactgatttgcatacattgacccatctttgcatccctggtgcaaatctcacttgattgtggtgtattatcattttgctgtgctattggatttggtttgttagtgcttttttgaggatttttgcatctacctttgtcagatatcagcctttagttttctttttatgttgtgtccttctctggttttggtaataggatgatcctggccttgtagaatgaactggggagaattctctcctcttttattttttgaaatagtttcaggagaattggtattagtttttctttgtatggtataatttggctgtgattccaagtgaccctgggcttttcttggttgggacactttttattactgatttaatctcactacttagtggtctgttcagattttatatttcctcgtcattcagtcttggtaagttttatgttttcaggaatatatctgttttccctaggttttctagtttgtcagtatatagctgctcgtaagtctctgacactctcttgtatttctgtagtatcagttgtaatgtctccttcttcatttccaattttgcttatttgggtattctctcttcttggttagtctagctagtggtttatcaatttgggttatctttttgaataaccaacttttcattttgtggatccttcatattgttttagtctccatttcatttaattctgctctgatctttattatttcttttattttgctaatttgtggtttggctttttcttgttttctagttctttgaggtacattgttagagtgttaatttgtaattgttctacttttttttttttttttttttttgagacagagtctcctcgctctgttgcccaggctagagtgcaatggtgtaatcttggctcactgtaacctctgcctcccgggttcaagtggttctccagcctcagcctcccgagtacctgggattacaggtgctcaccaccatgcccagctaatgtttgtatttttagtagaaatcgggtttcaccatgttggccaggctggtctcgaactcctgacctcaggtgatccacccgcctcggcctcccaaagtgttgggattacaggtacgagccactgtgcccagctaacttttttgattgcattctacatttattgctataagcttccctcttaacactacttttgccttatttcacaggtttgggaatgttgtgttttcattttcggttgtttcaagaaactttcctttggcctggcatggtggctcaccatgtaaaaatacaaaaattagctggggtggtggcacttgcctgtaatcccagctactcgggaggctgaggcaggagaatcacttgaatctgggaggcagaggttgcagtaagccgagatcatgccattgcactccagcctgggcaacaagagtgaaactccatctcaaaaaaaaaaaaaatttttttttctttcaattttcattttaattatgatctttagtggttatttgggaatatgatatttaatttccatttattggtatagtttccaaagttcctcttggtgttaatctctagttttattccgttgtggtctaagatacttgataagatttcagcttttaaaaatttgttgagacttgttttgaggcctactcgatggcctattatggagaatgttccatgtactgatgaaaataatgtatagtctgcatctgttgggtgaaaggttctgtgaatatctgttaggtgtgtttggtctaaagtccagtttaaatctaattttttaaaactctgattttttaaaactgtctaatgctgagaatgggatgttgaagtccctcattattattgtaatgcagtctctctctttagatctagtaatatttgctttatgaatctgggtacttcagtgttggctgcatatatatttagaattgttatatccactgctggtttaatcactttatggttatataatgaccttctttgtctttttttttttttttaactctttttgacttaaaaactctttaatctattagaaatatagctactcctgctcacttttggtttccattttcatggaatatctttttccatccttttactttcagtctatatgtgtcattaccagtaaggtgagttttttataagtaggatatttggggatctttttaaaaaaaaaatccattcagccattctctattttttaagtgggaaatttaatccatttatattcaaagttattattattattatgagatggagtctcactctgttgcccaggctggagtgcaatggcgggttcttggctcactgcaacctctgcctcctcagttcaagctattctgcatcagcctcctgagtagttaggattacaggcatgcgctggcacgcctggctatttttatacttttagtagagatagggttgtgccatattggccaggctggtctcaaactcctgacctcaggtgatcctcccacctcagccttccaaagtgctgggattacaggcgtgagccactgacctggctaaaggttattattcacatacgaagctttgtctctatcatattgttaattggttagggtgtttttttttttttttgagacttctgggctcaagcagtcctcccacctgagccccacaagtagctccccatgcaccaccatgcctgggtaatgttttttttatttttatagagatggagtttcactgtgttgcccaggctagtcttgaactcctgggctctaatgatcttcccctctctggctccaaagtgctgggattacagatttaaaccaccatgcccaggcttttttgttgttttatgttttttttttttttaatttgttttcttattgtcactgtggcttggtagatttctgtagtagtaccatgtgagtcctttctctttcttctttatgtgtttgctttaccagtgagttttatagtttaccttattttcatgatggtaagtgttgcagtgtttttttttttttttttttttttgcttccaggtttaagacccccttgagcttttctttctttttttttttttttcgtttctgaggcacagtttcactctgccacccaggctggaatgtagtggtgtaatcttggatcactgcaacctccacctctcaggttcaagtgattcccgtgcctcagcctcccaagtagctgggattagaggcatgctccaccacacgtggctaatttttgtatttttagtagagacggtcttttaccatgttggccaggctattctcaaactcctgacctcaagtgatccacccgcttcgacctcccatagtgctgagataacaggtgtgagccaccacacccagccttcagcttttcttgtaaggccagtctagtggtaacaaatttccttagcatttgcttgtctagaaaggtctatttctcctttgtttatgaaggataattttgcttgatgtagcattcttggctagttttctttttttcttttagcactttaaatatatcatcccattttcttttgacctataaggtttctgcttagaaatcctctattagtcttatggggtttcttttataggtgactagatgctttttttttcttctaaggattcactctttatctttgtttgacttgaaacaatgtgaatataattgtgccatggagaaaaactttttgcattttatctccttgcatattgtgagccttctgtatctggatgtctgaatctcttgttaggctttggaagttttcatccataattttattaaataggttttcattgctaaataatggtaccacaatcacctgttaatgaatagttgtgttgtttccagtttggggactatcaagaataaggctaccatgaatatttgtgtaaaaattatttgtatagatgtatgttttcatttctcttggataaataccaaggattggattggctaggtagtatatggagatacgaattttatgaaaattcttaatttcagacctgtcaattcagtctcagtagcttcatttttcttagcttgataaatgatggaaatattaacccagtggcaattttatgtacgaacactgatgaatgtcagcagcactaggctttgggcagagtgccagaacaaatggcaaagcaaagcctcaacagctgctcctggggcataattaatgaccatgtcctaaagacattttagtgttaacatataaccagctgctgtttctcctgtaactaaatttaacaactgacagcaatatgaacagcgttttatgaaatactcccaatacagtctctattaaatgaatttggcagagggctatgctatgactggtgccctatttcagagttgttttttaacattggtaatatcttttcatgcattagaaaggcccaagttggccgggcacagtggctcacagctgtaatcccagcactttgggaggctgaggcaggcgtatcacgaggtcaagagattgagaccatcctagccaacatggtgaaaccccatttctactaaaaatacaaaaattagctggccatggtggcatgcgcctgtagtcccagctactcagaaggctgaggcagaagaatcgcttgaacctgggaggtggaggttgcagtgagccgagattgtgccactgcactccagcctggcaacaaagcgagactcagtcaaaaaaagtaagaaagaaagggtggggggagggacggagggagggagggagggaggaaggaaggaagggaggatggattcaagtcacataaacatttgttagatttgcttctgaacctttgtgaaatattactttcttgttacatagtgggcagtaactttgtaagatctcaggaaggaaggaaggaaggaaggattcaagtcacataaacatttgttagatttgcttatgaacgtttgtgaaatattactttcttgttacatagtggacagtaactttgtaagatctcctaagagaaggaaggaaggaaggaagggagggagggtccaagtcacataaacatttgttagattcgcttctgaacctttgtgaaatattactttcttgttacatagtggacagtaactttgtaagatctcctggtgtccagaactcaagcttgatttctgctgtttctgaatatctcttaaagaaacaagtactggaggcagagaataacccattaagtgttctctgaactatgaggcatctgagcctatctgatctttaagtcaaaataatgaagtgagccaggcatagtggctcatgcctataatcctcgcactttgggaagccagggtgggaagatagcttgagcccaggagttcgagaccagcctgggcaacatagtgagaccctgtgtctacaaaaaatttttaaaaaatttggcggacggtgtgacacacacttgtagtcccagctacttgggaggctgaggtgggaggatccttgagctcaggaggttggggctgcaatgagccatgatcaccactccagccttggcaacagaatgagaccttatctcttataaataaataaacataaaataatgaagtgaaagtcgatacaagaggtggtggagcttgtagcagatgacaaccatgtcccctgaggtgactgatacctccagtgttagaggtggaagagcatcacctctaaataaaaatgatcttctgcgctctcctagttgggacactagtctttggggacaagcaagtactataagagggacttgtatctatacaaagacttgtacaactgggcttgaaattttcattaagcatgtaaatgttatcccactttcttgggaatctttgattattgctatggtttgaatatttgtcgcctccaaaattcatgttgaaatttagttgccattataacagtattaagaggtggaacctttacaaggtgattagctcatgagagctccacactcatgggtgggattcatgctgttataaaaggacaagttgggcatgcttttatctctttgcctgtctgccttccatgtgaggacaaccatgtatcataaatatggccagtgagatacaagcaaaaatatttgggggtaatgggtatttgaaagcattttcttccttaatttaaaagggacataatcagccaacacagtcttttcccttgatttttgtcaacagcagagaccagcattgagtccctgatatagcagcattcccttttggaaccagctagccaccttatagaaggccgaatacactgggcctgttctgtcatggatgagacagagattcattcttataagcatggacagatattctggaatagattttttttcttgcccgtaatgctgctgccagcatcacaaccatggacttacagaatgctttcatgctttctccaccattatggcatccccccagttttgtgtgtgatcaaggactttttttttttttttttttaagagtcttgctctgtcatgcaggctggagtgcaatggcgtgatctcggctcactgcaacctctgcctcctggttcaagcgattctcctgcctcagcctcccaattagctggaattacaggtgcacatggccacactgagctaatttttgtatttttagtagagacaggtttcaccatgttggccagggtggtctcaaactcctgacctcaggtgatctgcccgcctcggcctcccaaagtgctgggattacaggcgtgagccatagcacccagcctgattacaggatataaggttaatatttaaaaatcaggccacgtgtggtgggtcctcaggcagatcacctgaggtcagaagttcaagaccagcctggccaacatggtgaaagcctgtctctactaaaaaatataaaaatcagttggaagtgattgtccatgcctgtaatcccaactactcgggtggctgagacacgagaatcgcttaaactggggaggtggaggttgcggtgagccgagattgcaccactgcattccagcctaggcaacagagactctgtctcaaaaagaaaaaaagaaatggggtcttgctttgtttcccaggctggtctccaactcctggcctcaaacaatcctcctgccttagtctcccaaagtattgggattacaggcgtgagccatcatgcctggtccatcttctcatttggatagctgtaccttgctaggtagaaatagagttgtttcattgttgtaaaggagctcaagttttgtataaaaaagtgtgtagaaacttagtacccaaagggttagactaggtcagttatcagtgtattgcctctcagctccaaattaaccttttcaacaccagtctgtgaaagtggacaacttgaagcatttctcctttacagtgagtgtgatattaagctttgtcagtagagggtgtggacattgaagagggacattgaaggaagaaggggtctttctggctcaggttgcagcattttgcttttccttgctcttgcttcatggtccatcagtgggaggtgtgtatgtgagaatattcagcgatgctctgcgccagctgtgctccagagcatgcagtctcttggagatcttgcatatctggcctgggcctggcagactaccttgctgaggcccttctcatgagagaccgtgtgctccagacctcatgctcacagtggcacccaaactcctctgcatcctggccatcagccgtagcttgcttgtgcaatggggagtaatttcctgtagctgtcctgatgtggaaaccatgcatctcaggcctaaggcctacagtgccactccaactctctttgagtacctggcaacgtagcaaacttctccagcatcacactgagctacaaccacattcagtgaggtttgaaactcacccttgggaaagacctccttccaagtatgttttcttttgggtactctccctcagctctaaagggccttttagagtcctcctcatggccctatagtttctgtcctatcattgcttaataattctttatattataattctgtttaaattcctttggccaggcacagtggctcatgcctgtaatcccaacactttgggaagctgaggtgggtggatcacctgaggtcaggagttcaagaccagcctggccaacatggtgaaacctcatctctacttaaatacaaaagttagctgggcatggtggcaggtgcctgtaatcccagctacttgggaggctgaggcacgagaatcacttgaacccgagaggcagatattacagtgagctgagatagcacccctgtactccagcctaggcaacagagcaatactccttctcaaaaaaaacaaaacaaacaagcaaaaaattcctttgtggtttctgtttcctgactgtatccagactgatacaaactgaccatagaagctggctgctgatgcttaaaaagcttctcatccatccatttctggcaaaagcccatcatcattcaccaagaccttcacacttaagctttccatgatacccaactgcttaaagtctcataaggcaggacagtttgccatcaaccaaaagcataatgagttgtttcatcacaatggtcctgtctccatggcagatcataatgtccacagtaaagaatctcatctttctctacaagataggtgtttttgccccattagtgcttggaatagaacactgggcatgaaggagaatctcaacaacatgaaaatgcatatctcttaacagtggtgttgtagtttcttgtgggctaaattgaaaacccaggaacaaaataaaaacttggttgtatttgaaattatcccataaaatatctaagatgtcctacaaagcatataacatggatcagttatccaacactgaagaataatatgtatatatgtgtgtcaactgtacaccataatatccatacatggtagaaagtccacttataaaatgtaatttcatgattcatatttatatgagaaaaatacatacaaatttatatgagagtaacacatattaatttacatgaaaatgtaacatataccttatattaaatatgcatatgggccaggtgcagtggctcacacctgtaatcccaacactttgggaggccgaggcaggtagatcacgaagtcaggagatcaagaccagcctggccaacatggtgaaaccccatctctactaaaaatacaaaaattagccgggcgtggtggcgggtgtctggagtcccagcttggacccaggaggcagaggttgcagtgacctgagattgcgccactgcactccagcctggcaacagagcaagactctgtctccaaaaaaaaaaaaaaactatatatatatatatgcatatgattgttaaaaaagaggagattcatatggtctgaagttatcatccctcaggttacttaccaattaaaaaggggaaaaataactacaatggagacatgtggccattaccatcttagccaagtgatcaaattggctcactgcctcaaaaaaaaaaaaacatgtttagtactgaagtataatgattcttgaatttattttcaaatggtagagagagaatcaaaagtggcaaattgttaaattgttgacaatttgtgaatctaagggacaagcatgaatgagttctttttttttttcttttcagagtcttgctctgtcccccaggcaagagtgcagtggcacaatctcagctcactgcaacctccgcctcctaggttcaagcgattctcctgcctcagcctcctgagtaggtgggattacaggcacgtgccaccatgcctgtctaattttttgtatttttagtagaaacgggctttcacggtattagccaagatggtctcaatctcctgacctcctgatccagccacctcagcctcccaaagtgctgggattacaggtgtgagccaccacacccagccccaatacaagttctttgtagtattctttcaatgcttctggagatttgaaacttgccaaaataaacaactgaagtaaatgtgcctaggaagtgggaaggcactgagcttattggggacatacccaaagaccccactggaacagaactaaagaaccagttctctgattcgttaccataagagaggaagtttcaggagaaggaatgcaaaagttctatatcctaattgaaagagagcgaaagaaaatatctcaagcaaggaaggacaggcttatcaaggatatagttttttgatgaatgacaggtcatcccaacctcttcctgctgagggaagatttcttcatctagatactgaggtcagaagtgtgaaatgagtcctgtgggctaaaatccaggtgtcataaaaccgtgttctttctctaggttctaggggagaatctatttccttgtcttttccagcttctagaagctgcctgcgttcttttgcttatggcactttcctccgtcttcaaagcacatccccgctttcgttgtcatgatttcctctctgactctgaccctcctgccttcctcttttaaggacccttgttgggcctactcagtaatccagcataatcttcccatctcaagatttttttttttttttttttttttttttttttgagatcaagtctcactctgccgcccaggctggagtgcagtggcgagatcttggctcactgcaacctctgcctcccgagtacctaggactacaggcatgcaccatcatgcctggctaatttttgtatttttagtagagactgggtttcaccacgttgtccaggctgatctcaaactccttacctcaagtgatccgcccacctcggcctcccaaagtgctggattacaagcatgagccacgatgcctggcctccatctcaagattattagttgaagcatatctgctgcagagcctcttttgccatgtaagatatattcacaggttctgggggttaggatttgaacgtcttggggcattattctaccactttgtcttattggcataatttatgaatttcttttttcccaatcctttgacataactatataaattttatacattattgaaatcagccttttatttggaacttttgcatctataaccacaaatgaaattaatacttttcttttggcctgtctttattgaatttcttttcttttcttttctttcttttggagacagtctcgctctgtcgcccaggctggagtgcagtgccccaatcttggctcactgcaacctctgcctccgggtacaagtgatcctccagcctcagcctccccagtagctggaagtacaggtgtgcgccaccacatccggctaatctttgtagaaagggggttttgccatgttgccgaggctggtctcaaactcctagcctcaaagtgatgctcctgcctcagcctcccaaactgctgagattacaggtatgagccaccatgcccggccatgtctttaataaattttatgccacttagacaaaaattcattggagagcatatataagttggatataaatacattgaataatcattattagttcaaaaattagctaaaattcagctataaccatctgggtatggtacctttttaattgtacatactttaaaatatcttaaataaaataaagcatttcattatggttattattctgttcagattttctacttcttagtagaaatcagtgatttaaatttcattagaaaatctacagtttcctctaccatggttatagagttgtacataacagcctcaaaattcttttaaacccaggcctgggcacggtggctcactcctgtaatcccagcactttgggaggctgaggtgggcggatcacctgaggtcaagagtttgaaaccagcctggccaacgtgatgaaacctcgtctctactaaaaatacaaagaatacaggcgggcacctgtaatcccagttacttgggaggctgaggcaggagaatcacttgaacccgggaggcagaggttgcagtgagctgagacggcatcactgcacaccagcctgggcaacaagagcaaaactccgtctcaagaaaaaaaaaaactcttaaactctttatgttttttttttcgcatttctaatgtttttgctttattttgctcttgtatatcagtcttgtgtttcatttatcttttagtactaaactgtggatttttaaattttggtccagtagtttgttttctagtttgtaaactagaaatacttaagaattttttttaatgaaatgttataagtaatgtttcacaagaaagaaacgataatggccaaaaatataagggactactttttaactgaaaagaaaaaaagtcacaattacacatcctagaagttaactgctgttaacaattaactttaaagatattattgcccaagtgcctatgtttctgctatttataactttgttttttttctttttgagacgcagtctcgctctatcgccaggctggaatgcacctccttagtagctgggactacaggtgcacaccaccacgccaggctaatttttgtatttttaggagagacgaggtttcaccatgttggccaggatggtctcgatctcctgaccttgtgatctgcctgcctcggcctcccaaagtgctaggattacaggcgcgagccactgcgcctgacctatttataacttttttttttttttgagatgaagtctcactgtcaccaggctggagtgcagtggtacagtctcggctcactgcaacctccgcctcccagattcaaggtattctcttagcctcctgagtagctgggactacaggtgcgcgccaccacacccaggtaaattttgtatttttagtagagacagggtttcaccatgttggccaggatggtcttgatctcttgacctcgtgatccgcccgccttggcctcccaaagtgctgggattacaggtgtgagccaccgtgcccagcctataacatttttaaatacagtatttattttaaaaaattggtttattttagtagcacttttagtaacacaaaagtgcttttattttagtagcacttttagtaacacaaaagtgctactaaaattggtttattttagtggcacttttccaggtcctaaagtatttctcgaacatacttctgtcattaaatatccttctgcaacttaatcctcaaataatgacgttgcagcccactatattggttttccgttatttccgctgcagacccaactatccctcatccttctccagtcccttcggcatcctgagcctgtgactgcgccccttcagtctctcctaggccacatccccaaacctctaggacaggtcgtttcccagacaccctccaggccagcctgtggcccggcccgagcagaaattagtgacttaaatgttgagatgccagaagacctggactggggcatgaattcccagcccaaacttagccacccggctttatcgggattgtggcccaggtcagtgaagccccaggtccgggccgactcctaattcgtggcgtggccgggagtcgccctctcctgatccaccccagagcgcggctccctgtggagggtaccctgggtggtccgctccctggctttttacagcacttgtgagaggcctttgggcacacacacaaaccccactccctgaccctccgtttggggcgagggcggctgcagccgggttaacttcgcggactctggaagccctggcggcgggcccggccgccccttcccgggtttgcggctacatttttctgaagcctccacggccccacagcctttttctagccgtcagcggccaactattgctgcctgggcctgtgtgtttgcccagttcctgggagggtgctcgggtgcagctgggcagtctggcctcggcttcactggaggcggggaactggacatgactgtgagcgccagtgaccgtggtgcggtccaggccccgggtggcgcacccacctctggactacatttcccagggggccccgcggccaaccttttccggccgaagaaggctagtcacctttccttggcgggtgttggaaagcaaagggctggaacgtcccgggctgcggagctcgctgggttgggatggactcgttcagacctgagtgctaggacgccgaagggggcggtgaggcgtcccggcgaggagctggggtcgtctggagtttaaaagacaggtggctctcggagatgtgcgggctgcatgcccacgcttcaccgctaggggaggtcagggctgtgcgatggggaaggaagagagtgtcggggcggtgcagtcgggatgggagaagggtgtcagggccactggcccccagctcggcagagggcagtgtcgggccgcgcgcaggcagggagtgggtgtggtgtgaggctggcgctggagcggtctgggaatgttaggaggtctagggtatcgcggccctgcgtcctcttgtctggactaaaagtccgggcagttctccccggacctggattgtgggcccagcgacaggtgcttggcgatctgtgcccgctgtgcctgcggggctgtggtgggagtcctgtctgcacggtattctgtgtggctgtgcatgtaagtgtgagcgtgtgccgggtcatcgaccccatctttgggaggcctgggagggggcgggacaccctcgctgtacattctggggatacgctgggcggggtctgccctgtggatgggtcctggccgtctacgcaaaccccaactgagactagtcagtaggtagtgaatctctgtgaatggccttccctccatcgggtctatctctggtgtgtgttgagggtggaaatggttctagagtttggggctgggaagtccctgctatatccacttctctgttctttcacccagtagccaccagggatctagacccataaaggtgcccccagcctaaaggacagcagtttgagaccctgacaggtgggtccatttaagctgtgtcttggcgccacagacttttgggctcagtgtaagacgctaggcctgaaagtttcccaagttaggctgttatggaggaagagggctacggtctggggggctctcccaggacttctctctgggctcctaaggtcacctgcatttctttgtgaggatgacagagagcggtggcgttgcagcttctttggtctccctttcagtgcctggggtggggcaggagtttggcctcccaaggggttcagggagggattcaggatggcttcttaacgtttttccacatctttctttaagaacccagaagaggagagaactgctgtgcgtctgaagtgatggcggaggtaagttgcatttgacattttcttggaaaggacttactggttttcaggacagtgtcctatttcagaaatttatctaaaatatttacattcatgatttggacaaaggggaagaggggaggaaactgcatttatgtagcattttcctaaagcagcctagggctgtctattttgcaaacattgtctcatctgatctagaatttccacttccctggattttattcatgctcacaacagtgttgacagagaacatgcctcagtgatttggcagggaaattgaacaacagaattagctttttcagtctcactgatttctgcattgtcccctccatgatcatatgcaatagcctttttgcttaccaattttttttttttttttttgagacagagtctcgttctgttgcccaggctggagtgcagtggtgtgatctcagctcactgcaacctccgcctcctcggttctagtgattcttctgcctcagcctcctgagtagccgagattacaggcacacaccaccacgcccagctaatttttgtatttttagtagagacggggttttgccatcttgcccaggctgatctcgaactccttaactcaggcaatccacctgcctcggcctcccaaagtgctgggattacaggcgagagccatcttgcacggcccgcttatcaatttctttctttctttcttttttttttttttgagaccgagtttcctctgttgcccaggctggagtgcaatggcacaatctcggctcactgcaacctccgcctcccaggttcaagcgattctactgcctcagcctcctgagtagccgggattacaggcacgtgccaccacgcccggctaattttttgtatttttagtagagatggggtttcactgtgttggccaggatggtctcgatctcctgacctcgtgatccgcccgcctaggcctcccaatggagccttgctctgtcgccagttaggagtgcagtggtgttatctcagctcactgcaacctccgcctcccaggttcaagcgattctcctgcctcagccttgcgagtagctgggactacaggcgcatgccaccacgcccagctaatttttctatttttagtagagacagggtttcaccatgttggccaggatagtcgcagtctcttgactttgtgatctgcctgccttggcctcccaaagtgctggcagcaggcgtgagccaccgcgccaagactttttttttttttttttttttgagacagagtcttgctctgtcactcaggctggagtgcagtggtgtgatctgagcgtgatctgagctcgctgcaacctctgcctccctggttcaagcaattcttctgcctcaacctcctgagtagctgggattacaggcgtgcgccaccatgcccagctagtttttgtgtttttagtagagatggggtttcaccatgttggtcaggctggtctcctactcctgaccttgtgatctccctgcctcggcctcccaaagtgctggaattacaggcgtaagccaccacgcctggcctcaatttcttataacctggaatgcctacctgtccactttatctccggatagtttttcaagatagaaataacctgaatgccctcttatgattaaagtgatatacaatttttgcaaaagtttcaaaatttgagggagtcacaaagaaagtttaagtcaccccatccgtggtcccactatccagatggtcactattaatgttttcagattattttgtctgcttatatgtgtagtcatgtgatttttttttttcagagtgggttcatactactaacagaagtagctaacttattgagcatgcactttgagccacttatagttggactttctttacagatgtgatcttgtttaatccacataacaaccctattagacaggtatgactatatttcattaattctctgatgtactttttctcacattttaatctctctgaaatcaaaatggggtttacaaaaattcttggcaagtcatagtttcattgatggcatttttttttctttcctagtatataaagttataagggccttattatcagtgacatctcagactcaatgaaatagagtattattctaagttgacaactgaggaaatcaagtcactcgcctcaaagttacgcagttaaaaatggtagagctggccgggtgcggtggctcatgcctgtaatcccagcactttgggaggccaaggcgggcggatcacctgaggtcgagagttcaagaccagcctgaccaacatggagaaaccccatctctactaaaaatacaaaattagccagatgtggtggcgcatgcctgtaatcccagctactcgggaggctgaggcaggagaatcggctgaacctgggaggtagaggttgtggtgagccaagattgcgccattgcactccagcctgggcaacaagagcaaaactccgtctaagaaaaaaaaagaaagggtagagctggggtttctacatcacctactgacttcctttgcccacttgtcaaagaatgctattttttaatttattttaaacaacatttcatatgttcagcatattttctctttgtcatttatacgttgttttagaaatattttttcacagttaatctattttgtgtgcttttagattcatttagttttcataaatgtattcagataaatcaactcttttcttaaaatttttccctttttgctgtgccagatggtctttcttaccacaaaaatagaatagttacttttatattttcctaaaatactttctgtcttttatccaaacaatctagtctttaaggtgtctcctgtgatatctcaccagagaatgttggctataaaattccaaatttggagtgtttatttagattttttatgcaactttggagtaatatattttaaagagtggcatggtatttgtaggatgtgaaatttaaggtttttttgttttgttttgttttgttttttgtcctggatatgtctggatgtagcacttacttcattaattctggccagtcctcaagaattactttcactctaagactaaagaaacatattttctattctgaattaatcagtttctttctctttgatttttcttcagaattctgtaagaatttgttgaatttctcttcccattactgtagaggccaaaaccttcctaagattatcagaagatcaccacaccctccccgtccatgccctgcacactggtggggaggaagcttcagttccccttgcacttcaacccttcattgtctatttctccctgtatcttctgtcctgaaaatattaattgccctttgtccctgctaatgggaggctgtgcattgtgatgaaagggtagaatcttagcccatttctgccatttgctagctctgtgaccatgggcttcctcataatttcagtttggggaatgtgatgataatggaaattcacctgcacttacactggcaacctggggtcccccagctcctaccttctggtctccccaacatccagtgaagtgcccaatttcattgcttcttttcttttcctgttctgtgagcttatgccctagggcctcactccactgtcttttgccttgtgggagtagatactacattgaactgattgggctccctggctccacttttactctttgccaataagataatccagtaatgtcaccttttgaattttgttcagtgaatccctggtactttcaggataaatctccaactctttcacgttcattgcatatttactaaaaagcatattctgtatttagcagagcacaaagcctaatgttggagtaaagtggtgagcaaagatgatgtgtttagtcctggcaggtataacctgtcattcaaaacatttcctgccctgattcctgtggagttctccaacatcacttctctctactcctccctcagaacccctcatcagctatcccagttaactttctgctcctcagaaacacagggtgcaattggtctcccttcttacctccatcttctgctctctctacttggagtgctgttcagtgtgttttctgcttgttggaattctgttccttttctaagtcccagttaatcttccacacgttacgtgaaactttccccacacccctcaatctgagtaggtcactattttcttatttcctatagcaagattcttcttttaatgggaggcaacgtatcctgcttaaaaacccctcagttaattatttcatctgtgagaacaagtttaaatgtctcaggattgatccttcttttcagcctcgtctctctgctctctctctgactttacactagtcgtgttaaactactagcagttcccagattgcacagtctatctcatgcgtccattgtgcaagaaacacaagaagggcatttatccctcaccacccctttctctgggttctactgaacctagtcaagaacagcatctatgaaacctgtgtcagtctcatggttgcgcttggtctcaattgctgtatctcttatagtcgttttcatactatattgtaactatcttttttttttttttttttgagatggagttttgcccttgttgcccaggctggagtgcaatggcgcgatctcagctcaccgcaacctctgcctcccgagttgaagtgattctcctgcctcagcctcccgagtagctgggattacaggcatgtgtcaccacacccagctaatttagtgttttttatagagacggggtttctccatgttggtcaggctggtctcaaactcccgacctcaggtgatccgcctgccttggcctcccaaagtgctgggattacaggtgtgaaccaccgcacctggcctttaactgtctttttaaaactgctttttattaaatattgaatagtagaacatgtgtaatatattaagggggactgaacacccatgttaagaggtagaatgctaatgttagaaatcccatgtgtgctttgatcttcccaatctaaatccccttctttagctgtcagaggtatctgttattccgaatcttgtgtttggcatttccttgtttttctttacagtcttaaccatatgtgtttattttcctgttctaatttgatgtcaagaaatcatactgtttggatttttctgcaactctattacttgtcctccaacgagtgttcaagagatccattcacattgcaaacttatcctactgtatagccatccattgtaagaatacattttttcatttatattgtgtacattactccagtgaacattcttgaactcctctttttgtatcctgtgcaagaatttctgtatgtaactaaaaaaggaattgctagctcataggttatatgcattttcagccttactcaacattgcccagttgttttctaaagtgtttattatactcatttactattccttttacttcgtatcctcaccaacacttggtattattaaattttaaatttttacgcacttgggtatgagttgatatgtattattttgatttcaaatttgcatattttggtactaaatgaggttgagccccccacccccgcaactttcatgctcattggcattcatgttttctcttttctgaagtacaattttatgtcatttctaatttttctattgatttttatatttccagagtttttgttccttttaatgctttgtatgcatttcttaaatattgtggattgtcgtccttgccggttatatgtgctgtgcatgctttcttactttaacctttaaatgatggtagatattctcaattttaatgccttcaaatttaatgctgttttctttaatttatttacatcttgtgtatgaaatctctcctctcctaagagtaaagatattatccctattttctataaatgatattattttgcctttaatgtttaagtcttcaattcacttggaattaattgtagggtgtggtatttccatttggataatatctgaaacatcatttattgaaaaggccattgtaaaggattaggcaaactgcaaggtctgagggaacagtccctacaagatgccgtcactcagacaccagctacaacttaagaggttcccatgaccactctcactttagaccagctagctacaaattcaggtatttccaccaccaccacccttaggtataataattcagtagaaagcctcacagaactcaatgaaagctgttatattcacagtcatatttataacagggaaaggatacattgggttgtattaccctcccagtattgatgtttggcagtacacccagagtattgtcaaccagagaagctcactcaagcttcagtgcccagtttttactgaagcttcattacataggcatcattgattgaatcattttccatgtgcacgaactcagtttccagcatctgtcctccctccttgcctgaaagtcaagctgataccacacggctcaaagtcccaagaccgattacatggtagaagtaggtgtggccagccccaagccctagtcatctcatgagcataaactaacagacgtggtcttaggggctcaccataaataacaaagacattcctatcactcaggaaattcaaaatgtttagaggttgcttcccaagagctgggacaaaggccagacctctttttggaggccacattccttactacacagtcctcctttctatgtacttcagtggcagttctgtcataaattaagtttccctatgtatatgtttgtctattctgggctctcctttctaatctgtccgtccgtttgtctatttaaaccatactgcctaaagactgctttctagtaatgtctgatatttggtaagtcacatgcctctactatggtcctgttctctagaaaggtcttagctgttcctaggttttggcttcatatacattttagaattggcttatcaatttctgtagaaatccagttgggataatgatttataatgcattaaaccttcgatcaatttggggaaagttgacatttttacggtattgagtcttcctctgcctctaaataactctgcttacttgagtcttgtggaatggttttcaataaatattttataattagagtcttacacatcttttgttaattttatttccaggtatttttatattttgtgtttttcttagatgacattaactttagaatatagactgggtgctgtgactcacgcctgtaaccccaacacgtaaggagaccgaggcaggcgaatcacttaagcccagcagtttgagaccagcctgggcaacatagtgagaccccatctctactataaataaaaaattagccaggcatgatggtgcatgcctgtagtcccagctacttggtaggctgaggtaggagaatcactcaagcccaggaggatgaggctgcggtgagctatgattatgccactacactccagcctgggtgacagagcaagacccagtctcaaaaaaaaaagtaaataaaataaaatataattttctcattgtttctggtatatagacttgccattgatttttttttttcttaaaactcctatgacagattattgcagttgattttgagatattgattttatatccccccaccttgcttaactcttatttattctgacgtcttgtagattcttttggatgtggggtcatccaacttgatcatatcattgatgaataaagatactttttggttgtaaataattgtctttgtctattagtattgatttcttttcttcttttttaacctttattttaattcttatcttgctgcactggctccacctcccagaacagttttgaatggtgaatatgggcaccctgtcttattcacagttttagatacttcacttttacttatgtttgcacttgttttttttgtaggtgtcctttatcaggttagggacgttgctttttattgctaattcgctcttgagtttttatcatgaaggaatattgcatttttaaaatgccttttctgcatccattgaattgattggtcaggtgtggtggctcatgcttgtaatcccagcactttgggaggcttagtcgagcagatcacctgagatcaggaattcgagaccagcctggccaacatggtgaaaccccatctctactaaaaatacaacaacaaaaaattagccgagcgaggtggcaggtgcctgtaatcctagctatttggaaggctgaggcaggagaatcgcttgaacctgggaggcagaggtttcagtgagccaggatcgcgccattgcactccagcctgggtgacaagagcaaaattccatctcaaaaagaaaaagaaaagaaaagaaatgatcctaagtgttttctctttaatctgttaacgtgcctaataattttaatttatttccagtatcatgtacacctttattgggaaaaacctaacttagccatgatgtgtgatgaatttttacatattactggattcagtttgctaataacttgcttagaattttaaatctgtggcatgtgtaagactggccagtaatttcaattcttcataatgtctttatacaagttactctatcccaggagaactgtggccttggcctgtgaaccaagattgttttctacatttttaaatggttgggggaaataatcaaaagaattatattttatgacacatggaaattatatgaaattcaaattttagtgttcatgaataaagctttattggaacataaccacattcatccatttatgtaacatctatggctgcttctgtgctgcatggcagagttgaggagttgcagcagagatggtatgtcccacagagcctaagatacttactatttggcccttgacaaaaaaagtttgctgacctctggtctagcctcataaaatatatcagttttccttttctttttcccatggtaggatctgggagtactcatgttatcaatggtgtgagcaaggccactcttcagattatttgtttattccctgtcttctatgccatttactacccgcatcctccccccgcccataaggcagtcgtgttaatgtgcatcgttttcttagtatgtattcattcatgcaaaatgtttttctcttttgttaaggtccagggtggtcagtttttcaaaatcttccatatatgattgagaagaatgttatttgaattgagtgcattgttctatatgcagccattagatcaagcttaatttagtatctaaatattctgtttttactgactttttgtctgttgtatctatcagttatttctagtgttttgttaaaatctgccactgtgattagggttcgtctattagagtttctatttcatttatgcatatgtgtatgtatatataatatgtatttattatttattaggtaagcataaaattatccttttctaactgtcatctttctgaatatttatgttttggatgtgtctctaataaccagcgtagagctgggctttggtttttgacaactttgaccaactttgtccttttttttttttttttttttgttgagacagagtctcgctctgtcgcccaggctggagtgcagtggtgcgatcccggctcactgcaacctccacttcctgggttcaagcagttctcctgcctcagcctcccgagtagctgggattacaggtgcatgccgccacgcctggccaatttttttgtatttttagtagagagggggtttcaccgtgttagccaggatggtctcgatctcctgacctcatgatccccccacctcggcctcccaaagtgctgggattacaggcatgagccaccgcacctggcgaccagctttgttctttaacgagagtatttagtcatttacagtgcttgtaattactaatataattgaaggtatcatttttgtgcttttaattctaccttttctgtatttcattatcttcatttcattttcccttctatgagtttgaaagttataagctatttgtgtttatttagtggttaccttgaaaatttcaatatactttcttaacttactagtgtctaaaactaaaaaatattattatattcttggtaaataaggaagtaggatatattctaactaatcaaacaacttacattattgtcaggtatttttcttctttttttaacccataagaaatttttattttatgtattgagtgttatcttagattatccatgtatttacgactttcttggttcaccattctttcttacatgtcaagctctccatctgggatcactttcctttagatggaattaaatagtaaatttctctctgattttggtgtttgttttttttttaacatctttatttgccctcatttgtgaaaggtgttttaccctcacactgggatattccgctgtcttctggtttacatttttgttattaaatagtcatctgtcaatcagacttttttttttctgtagataatctatctttaatctcaaattgcttttcacgtattctctttgtatttagtgctctgcagttttggtgtgattgtctaggcatggatttatttttatttattctgtttaagacttattgggcttcctgaatctgaataatgccaattctgaaaatttcttagctgtcctgtcttccaatactgccattttcttaattctttctcttttctccttctagaacttcagttaaatatctattaagccatctcacattatcttcttaatctctcttctgtacatctgctcatttgtctttttgaattgcattctgcataatctctttttataccttgcagtccagtaatttttctcttcagagagatttattccagccattgtatgatttaagtatgttttttattttatatttttatttcttttcctttttttgaaatctactgtcatctttgtgaagttttcttattacattgcttccattttaaaaacatgtaatatgcttgttttataatttttggcattatctgtataatatatgaatcttttacagaggtgattcctcctgcccctcaacattttattagggaaattttcaaaacataatgaaaagttgaaacaattgcatgactgattttcctgactctttgttcatggaattatgcctctttgcatgtttttgtttgtttgtttgttttgttttgttttgttttgtttttaagacacagtctcactgtgtcacccaggctggagtgcagtaatgcgatcttggctcactgcagcctccacctcccaggttcaagcgattcttgtttctcattctcccaagtatctgggactacaggtgcgcaccaccatgcccggctaatttttgcattttaagtagagatggggtttccccagattgaccaggctggtctcgaacccctgacctcaagtgatccgcccactttggcctcccaaagttctgggattacaggcatgagcctctacacctggccatttttttttaaatttgattttttgtttaggcaaaattcacataatatatagttaaccattttcaagtgcatagttcagtgacatttagttcattcacagtgtggtgctgctttatttttgactcataggttattttccttggaattctaccccatagattcttgaggcctgattgaaggttgttcctctagggcagatctgtgtttgcttctaccaggagccctgccaaaccaggaccaccataaagtaaacacatggcaagttttttagatccaccttagtattgttatgtgaactgcaggcctgtgtgagggctggcttgtagttacagttcctcagaggaaaatgtttcccttctgccatctgccaaggttccagtcaggcagttttcctagcggaccctaggaatgggaatgccacatctggttttcccttactctaagggcgtggttctagaggtcccaggtctttgtagtatggaattaattagaccccccaacttggccagctataggcttgatcttctctccacctgctccttaatatcatgaatgtcaaagcttatggtcttctgggctccatagacattccctgggcaaaataagcctcagtggctcagcttacccctctctgttcccattttgacatagttttatctgctgaagattactttacttctctgtcagctcatccttgaattctaaaatatttttgatattcaatctcttatttttcagctggtgatttggttgtagtaactagtcccccacagagcctggtgtcctatgattgattttctttttttcccccctccgtgactgagctttttaagaggaaatgcatgctaggtaagagttatctgcgaccctggtgcccacgtagagccagagtcatggggatttgattcgtattttcggataagagaattttgttgacacagctgctcctctcttcccattcccttccgcctttgatctcccttcatagactgctgtgatctgcagtgacaaacacagcagacctagcattttccgctcccctaagtgcaggggccagctgagggttctttcaaaggatcaggaaattcccaggttgcatctacaagagccagaagttagaaggcaaccagctgcagacttggttatttctcagtagattcagaacccagcattgccactgtaactgcagatttgagtaaatgacttctcttctccaagctaaagtttcctttcagttaggattcatgaccttctcatgaggattaatatatgtaaggcaccaggaacttaaagtgcttaaagaacaatgattgtccttgagatgcagtgtgcagtgtgcagtgtacagcagtaaggttaggggtagtagcaggagagaatgtcaggcaggaaggccatgggtaatctcggtttggaaccaggatgtactggccgtgaggattcctggaactgtggtttcatgcattgtgtatctgggtaattgagccctgctgaggctgctgagagcctgctgatcctgtgggttgtctggctcagtgctggtcattctggagagtctttgcagaatgaggttttagttttagttccaaaggccccagttctgggatatacgaacaaagcccaggaagtggctggtgcatagaacaccagaatttattcctctatctctattaggcttgagggaggctggaaccctctgttgtagaaatctttgtccagagctgggcctgcccaggtatcctgtgctcctgggccttgagggctccctcaagtctttggggtgccttcaagtctttggggtgccttccatggctgagggtctcagtgatatccaggttgtacaaaagggagcccaggccctgggctctgatcagctcctgacagtggggaagttgtttcttctgagtctgttattctatagttggattccctgggattcaagaaagacaaaggtttgttcattctttctcaaatctcagagagaaagaaaacacagactctgtgtgtgtgtgtgtgtgtgtgtgtgtgttggggtaccaaaagcagggatggggtgaagggattcattctcaggcctttggggaccttgaggtcagtctgatgaattttgtcaacaaaattctcttatccaaaaatatcagtcaaatccccatgacttgctttttcttccttttttgctttctcaggctttctctaggagaaacctagggtataaattttgtagttgtaaaagctattatctatgtgttagtatgtctcctctccttcattgaatgcattctttcatttttaaattttttatttttatttttgtagagatggggtcctgctatgttgcccaggctggtcttaaactcctggacccaagcgatcctcccacctccacctcccaaagtgctaggatcacaggcatgagccatcacacttggcctgaatgctttcttttctgttttttattttaattaacaatgtattagtcccttctcgcatgctataaagaaatacctgagactggggattttataaagaaaagaggtttaattggctcacagctccagctccacaggctgttcaggaagcatgatgctggcatctgctccgcttctgggggtgctcaggaaacttaccatcctggtagaaggcaaaggagaagccagcacttcacctggccagagcagaaggaagcagggaaggtgcgggacacttttaaacagccagatctcgtcagaacttactatcatgagaacagcaacaagggggtggtactaagccattcatgaagtattcacccctgtgttccagtcacctcccgccaggccctccctccaacatcagggattagaaatccacatgagacttgagtggggacacagatccaaaccatatcagacacattgtaatcctagcactttggggtcatatttatggggtacaatttgatgtttcagtacatatctatgtggtataatgagccagtcagggtagttagtgtatctatcacctcatgcatttatcatttctttgtggtaagaacattcaaaagcctctcttctagctattttgtaatatacaatattttattgttaaaccatagtcaccctactgtgcaatagagcaccagaatgtattcctcctgattgtaactttgtacccactgaccaacctctcgcgttttgtacccccaccccgtctctggtaactactgttctgctctctgcttctgaacgccttctttttgctttagaagatttgaacagattgaacagatttctttttcctaaaacttcttggcttccccagggacttgttccccagttcttcccattccagtcagtaatgctatcaaagactgctatctcttttattgattgattgattgagacagagtctccctctgttgcctaggctagactacagtggcatgatcttggctcactgcaacctctgcctcccaggttcaagcgatcctcctgccttagcccccctagtagctgggattacaggcacgtgccaccatgcccggctaatttttgtatttttagtagagacagggtttcaccatcttgaccaggctggtctcaaactcctgacctcaggtgatccacccacctcggcctctcaaagtgctgggatttacaggtgtgagccaccatgcctggccaaggctgctgtctcttaagggcccctctgttctccaagaagtgtttaggtatttatcagcaaacctcttagcatttataagtttctttgagacaacatcttgcttggtcacccaggatggagtgcagtggcacaatcatgggtcacttcagcctcaacctctggggctcaaagagctcctcctgcctcagcctcccaagtagctgggactgcaggtacatgccaccttgtccggctaattttggatttttttgtagaaacgggatctcactgtgttggtcttgaactcctgggctcaagcaatcctcccaccttggcctcccaaagtgttgggatgacaagagtgagccactataccaggattagcattttttagatgcatgttcttccaccgagagtactgatggagtaggaaaaccaatccttgctggaaactttcatacctcccttcttggagctgtgatttgatgaagtggaaatgaatggttaagtggaatcacatattgcaaacttgagttttctaattagacaagaaaggaattgatgttgatttattgtgttgcagtctcagtatcagccagtatctctagctgtctgaggattttaggactggggatatcctgagatatgtagattgtatggagttacagtgtattcccaaggagtctgtgccagatggataaagtgtgtccattttgaacttgtgtagtatgtgcgcacctcgtgtgacatcgttgtgagtctggatctttctccatcagttctggtagctaaggaacaaggagagtatggttggggtcatttgtggtaacaggaacaatttagccagatgtataaattgttgagaaatgaccaggcacggtggctcatgcctgtaatcccagcactttgggaggccaaggcgggtagatcacttgaggccaggagttcaagaccagcctggccatcatggggaaactctgtctgtactaaaaatacaaaaattagccagatgtggtggcccatgcctgtggtcccagctactcaggagggtgaggcaggagaatcgcttgaacctgggagacagaggtagcagtgagcggagatggtgccactgtactccagcctgggcacccaagtgagactctgtctcaaaaacaaaaaattgttgaaaaataatgaatgactattataactgcaaaagaacctttagaaaacttctccaacctacttcctcaaaacaagaacattgtatatattatatgaggaatcatgcagccagtaaaattgctgtctatttaagaatttttggtgatgtagaaaactgattcaggatttaatttattgaatgggaaagaggaagaggcaatgagaagtttgtgtgcttaacatagggtgttccgtgtacttgcacgtacagtttcatttaattgggaaacaccacttacatggacttagtttattctctgacctgggtagataatggaagtgcccagaggctacctttgcaggagtaagcatgcccaagaaccatgtgggcacttcactctgatcacccctgtttccacaccgacccctccatgttgaaggagccagtatggcctgttttcctaatggaacttccctattgaattgctttctccattttcttttatgttgtcttaaagattttgtccatgaatttcacaaatggtgtatttatttttggtttcagggcttgaagttcaaagatgtggtcatttacttctctcaaaaggagtgggaatgcttgcactctgctcagaaggatttgtaccgagatgtaatgttggaaaattacggcaacctggtcttactgggtaactttatctgcccctccgtacaccccctgccccgccaaacacacaattggccttctggaattcttatgttcttttttctgagtttgtcccaagtgcttttcaagtacctggatgagttaatgtttcttgctcaccaaaagaatggtttgtctcttgtgaagttggaaattggctgttccagcaggcacctttatcttcattattttcatacctcccttcttggagctgtgatttgatgaagtggaaatgaatggttaagtggaatcacatattgcaaactttttttctaattagacaagaaaggaattaatgttgatttattgtggtgctctgaccctcactccttcttctgacccttaatctacctgctcctctttcttggtaattagggactgatttttaattctgacacccacaacaaaaccttgttccctttgtttttgagcagggctttctgatactaagccaaatgtgatctccttattggagcagaagaaagagccctggatggttaagaggaaggagacaaaagaatggtgtccaggtgagtgacgatgaactggaatggggaggccatagcaggtggtcacttagctcatctgtgagaaggcagcacttcagggattttggtaggaaagctgcctaaaaaggcttgagatctggggaagaaagtaaggatgttgtaatcccagcagtttgggaggctgaggcgggcagatcacaaggtcaggagttcgagaccagcctgaccaacatggtgaaaccccgtctctactaaaaatacaaaaaaattagccaggcctggtggtgcgtgcctgtaatcccacctactcaggaggctgaggcaggagaatcacttgaacctgggaggcagaggttgcagtgagccaagattgtaccactacactccagcctgggcaacagagcaagactccgtctcaaaaaaaaaaaaaaaaaaaaggaggccaaggcaggcggattacgaggtcaggagttcaagaccaacctggccaacatggtgaaaccccatctctactaaaaatacaaaaattagctgggcatggtggcaggtgcctgtagtcccagctacttgggaggctgaagcaggagaattgcttgatcccaggaggcagaggttgcagtgagccaagatcgcgccactgcacttcagcctgggtgacaaagcgagactccatcttgaaaaaaaaagaaagtaaagcatgtttcagctccatttactaggctctcttgctcacctcctataatacctcccccctcatttcagagaggaagtaccctctttctttccctgtgacaaccattttacttgcattttgggtccagttttgtcctgactttttaaaacagttttattgagatatcataaaattcatccatttaaagttcagtaatttttagtcagttcacaaccatcacaacagtctaattgtagaacatttgtatcactcaaaatgaaacgccatacccattagcagtcactccccaaatccagccctaagcaactactgatcactttctgtctacatagatgtgcctgttctggacattttatattaatgatatcacacaacatataatttatgactggcttttttcacttaccagaatgttttcaaagttcatccatagtgtaacatataccagtgcctcattcttttatattgccaaatagtattccatggtatagatattaccattctgctcattcatcagttggtagacatttgggttgtttctacttttaggctattttgtatgactaaagctgctatgaacatttgtatataggttcccttcttttcttcgtttgttgagtatttttgtcatgaaaggattttagaatactttttaccattactttttctgcatctattaagacatctgtagtttatgtcctttgttgtatgaatatgtttgattacattgataacttttggatgttgaacctaccttgcatttgtaggataaattttacctggatgtggtatataatcctttatgctgttggatctggtttggtcttttttgttgaagatactggtctgtagttttcttgtgatatctttgctttgtctggttggtatcagggtaatacaggcctcagaattagaaaatgtttcttcgtcttctgtctttttgaagtgttcatggaggatttatattaagttttctttaatgttgggtaagtgaggccatttgctcctcggcttttctttatgggaagatttttttgctctaattcagtctctttatttggtataggtctattcaggtattctatttcctcttgagtcaattttggtagttttgggtctttttaggaatttgtccattttgtctaagttatctaacttattggcatatagttattcgtaggagttccttataaccctttttatttctataaggtcagtggtgatatctcctatttcattcctgatgttagtattttgagacttctctctttttttgttggtcaatctagccaaagatttgccaattctgttgatcttttccaaagaccaacttttggtctcattgattttctctgttgtttttctattctctattttgttcattgctgctgtgatcttttattatttccctccttctggaagctttatgtttttgtttattctttattatctggttccttaagatatacagttagattgttgatttgagatatctctgtttttttttctttttttttttaatataggtgtttttagctgtaaatttccctttaagccctgctttagctgcatttcataagttttggtatgttgacttttcatttatctcaaaatattttttaattttcttcatgatttctttaacacgttggttatttaggagtatgttatttaattttcacgtttgtgaatttcccagatttccttctgctgttgatatctaagttcattccattgtagttgcaaaacatattttgtgtgatttcaatcctcttacatttattgagggctgttttatggcttaatatatggtctaacctgaaaaatgttccatacatgcttgagaaaaatgtgtattctcctgttgttgagtggaatgttctacaaatgttttcttaggtttaattggtttatagtgtttttcaagcaatctgtttccttgttgatcttctgcctagctattctatccattattgaaagtaaagtattgaagtcttcaatttgttcaattgtttgtggctctctttaattcttgtgttacatattttgggcctgtgttattaggtgtatatgtacttacaactgttacagttttctgactatcattatattctcttatcattataaaatatccttttttctgatttgtgtgttgttgttgtttttttctgagatggagtctagtgttgttgcccaggctggagtgcagtagcacaatctctgctcactgcaacctccacctcccaggttgatgtgattctcctgcctcagcctcccgagtagctaggattacaggtgcccgccaccacacccagctaatttttgtttcactgtgttggccaggctggtcttgaactcctgacctcgagatctgccggcctcagcctcccaaagttctgggattacaagcgtgacccaccgcgcccggccaaaatatccttttttctcactggttacaatttttgtcttaaagtttattttgtctggtattagtaatgctattttacctcatttttggttactctttgcatggtatatctttttccattctttcatttcaactatttgtgtccttgaatctaaagtttgtctcgggggctgggcatggtgacttacacttgtaatcccagcactttggaaggccgaggtgggcagatcaattgaggtcaggtgtttgagaccagtctggccaacatggcgaaaccctgtatctattaaaaatacaaaaaattagccaagcatggtggcccgtgcctgtagtcacagctactcaggaggctgaggcatgagaatcacttgaacccagtgagtggaggttgcaatgagctgagatcacgtcattgcactccagcctgggtgccagagtgagactgtgtctcaaaaacaaacaaacaagcaaaaaacagtgtgtctctggtagattgcatatacttggatcacttttttttaatccatcctgccaacctcttcttgtagtgcttaacaaactctgtagtgtttaatatgtttacatttaatacactgatggggtaggatttacaattggtattgtggtatttgttttctatttgtgttgttattgttttattcctctattcttccattactaccttctgttatattacatgaatattttctagagtaccatttttgttcctatattgtttcgtatacagtagtctttgaaattattttcttagtggtcgccttcaagattataattagcatttcaacttaaaacaatctagtttggattaatactagcttaactttaatcttacataaatactttgctccaaaatacttctgttcccacctctcttctttgtactattattgtcatacaaattacatatttatacattataagccaatattggcaggataataaccccctcaaagatgtctatatccgaatctctgaaacttgtgaacgtgttactcttacatggtaagggggaattcaggttgcaaatctgctcaacttcaattagggagaggatcttaggttatccaagtgggcccagtgtaatcacaagggtctttaaatgtatcagagatgtggctgggtgcagcggctcacacctgtaatcccaacactttgggaggctaaggtgggcagatcgcttgagcccaaaagctcctcgttttctcatttttcacttccctttttttttgtaattgcagtgtaaagaattgcttattaactatttttattttgtcatttctactttcaggacttttctttgtcctgcaatgtgaaaatacctcctattttctttcttattattttgcagattgggagtttggaagagaaaccaagaatttatctccaaaggaaaacatttatgaaattagatcaccacaacaggagaaggccagagttatcagagaaatcagatgccaggtggagagacaacagggtcatcaggagggacatttcagaccagctgtaataccatttacttccatgcagtgcacagcccatagagaatatcagtggcttcatactggagagaaatcctgtgaatgcaggaaatgtaagaatgcttttaggtaccagtcatgtcctattcaacatgaaataattcataataaggaaaaagaacctgaatgtggagaatgtaggaaaatctttaatagtggatcagacttgattaagcatcagacgcttcatgaaagcaaaaaacatagtgaaaataacaaatgtgcctttaatcatgattctggaattactcaacctcagagcattaatactggagagaaacctcataaatgtaaggaatgtgggaaagcctttcgttccagctcacaaattagtcagcatcagaggatgcatcttggtgagaaaccctataagtgtagggagtgtgggaaagcctttccatccactgcacagcttaatctacatcagaggatccatactgatgagaaatactatgaaagtaaggcgtgtgggaaggcctttacccgtccctcacacctttttcgacatcaaagaatccatacgggtgagaaaccccataaatgtaaggaatgtggaaaggcttttcgttatgacacacagctgagccttcatcagataatccatactggtgaaagacgctatgaatgcagggagtgtggaaaggtgtacagttgtgcctcacagctgagtctacatcaaagaattcatactggtgagaaaccccatgaatgtaaggaatgtgggaaagcctttatctctgattcacatcttattcgacatcagagtgtccatactggggagaaaccctgtaagtgtaaggaatgtgggaagtcctttcgtcgtggctcagaacttacccgacatcagagagctcatactggtgaaaaaccctatgagtgtaaggaatgtgaaaaggcctttacttgtagcacagaacttgttcgacatcaaaaagttcacactggggagagaccccataagtgtaaggaatgtgggaaggctttcattcgaaggtcagaactcacacatcatgagagaagtcacactggtgagaaaccctacgagtgtaaggagtgtgggaagccctttggtggtggctcagaacttagttgacaccagaaaattcatactggtgagaaaccatatgaatgtcagcagtgtggaaaggccttcattcgggcctcacaccttagtcaacatcaaagaattcattcaggacagaggagtgaatgaagaaatgagggatggctcagaatttgattgacatgagaaagttcatactgatttggaaaaaaaaacttatgattctaagtgtgagacaccttataaatgttaggaattagcagggatttatttatgtttcagaatttattacacatcatgatacaactggtgaaaaattgaagacctccatgaatgtaaagaaagtagggaggcctttttggtggctcagaacgaagtcaacctcagggaattcaaatgggggagaggagggcagtgaatatgctgagaggagttaatcattcagacctttatcagcagcagagtcattagcccttaggggaaatcagatgattcaaaatataaatgcaggccgggcccggtggctcccgcctgtaatcccagaactttgggaggctgaggtgggtggatcacaaggtcaggagatagagaccatcctggccaacatggtgaaaccccgtctgtattaaaatgcaaaaaattagctgggcatggtggtgcgcgtgtgtaatcccagctacttgggaggctgaggcaggggaatcacttgaacctgggaggcagaggttgcagtgagctaagactgacccactgcattccagcctggcgacagagcaagactccatctcaaaaaaaaaaaaaattattattatacacacacacacacacacacacacacgctgggcgcagtggctcacacctgtaatcccagaactttgggaggccgaggtgagtggattgcttgagtcctggagtttgagaccaacatgggcaacatggtgaaacactgtctctacaaaaaatatttaaaaaattagccaggtgtggtggtgcatgcctgtaatcccagctacttgggaggctgaggtaggagaattgcttaagcccaggagacagaggttgcagtgagccaagatcatgccattgcacagcagcctgggtgacagagcgagactcttgtctcaaaaaaaaaaaacaaaaaaaaaacacaaaaaaacggggccgggcacggtgcctcacgcctgtaatcacagcactttgggaagctgaggcgggtggatcacttgaggccaggagtttgagaccagcttgaccaacatggtgaaaccctgtctctactaaaaatacagaattagccaggcatggtggcgcacagctgtaataccagcaacttgggaggctgaggcatgagaatctcttgaacccgggaggcggaggttgcagtgagctgagatcgtgccattgcactccagcttgggcaacaagagtgaaactccatctccaaaaaaaaaaaaaaaagaaagaaaatgtaaatgccatatatatgggacaccaatttgctttagctaacaaagtattcatctgacaatacttgaggaaggctagagtagtatttaaaatgcagcagattctttcatcccacataaatcttgttaaatattcacgagctaattctctaaaattaactggagctgaatcaatgtggggaagaatttaaccaatgtttagtttttactcacccttatcattattactcatttcttttagggtgaatttattaactacatctacattttctcatttataaaatagtactgttagcaccatatttcttagctgcattgtgggggttaaatacatttatattatttaaagcagtgtctgtctagtattgaaagtgtgctaaatgaaggcgtttattgtttttctttgttattttcttaatcatgcattattagacatgagaggaaggacttatatttgcagtgactataggaacatattgcatcatctctttttctttattgaaggttaggtaattccttctggagaaaaatttaatactgtgaagcctttatttatagctcacccttttgccttactaggcaaataatgtgaagaaacccagtagaataaaagtgggttgctgtgaagtcaggcggaagatttagatatttatcaaaacttttcaaaaggctgggcacagtagctcaagcctgtaatcccaggaatttaggaggccgaggcgggcagatcacttgaggccaggagttcgagaccagcctggccaatgtggcgaaaccccatctctactaaaaatacaaaaaataagccaggcacgatggcgtgcatctgtagtcccagctacttgggaggctgaggcaggagaatcacttgaacccaagaggcggaggttgcagaattaaaaaaataatacagccctagccaaaatgtatttctccactagaaaattttaaagctacctgtataaataatttttatattaaaaaggatatcggcctggtgaggtggctcacgcctgtattcccaacactttgggaggccaaggcgggtggatcatgaggtcaggagatcaaaaccatccttgccaacatggtgaaaccccgtctttactaaaaatacaaaacttagctgggcgtggtggctcacgcctgtagtcccagtagtcaggaggctgaggcaggagaacagcttgaacccggagtgggaggttgtagtgagccaagatcgcaccactgcactccatcctaggcgacagagtgagactccgtctcggctgggcgcggtggcttacgcctgtaatcctagcactttgggaagccgaggtgggtggatcatgaggtcaggagattgagaccatcctggctaacaaggtgaaacctcatctctactaaaaatacaaaaaattagccaggcctgtggtgggcgactgtaatcccagctactcgggaggctgaggcagaagaatcggctgaaccggggaggcagaggttgcagtgagctgagatcgcgccactgcactccagcctgggtgacagagcaagactctgtctcagaaaaaaaaaaaaagatgtcaaggcaggccttattaggaatgaatgacaaagggaacactacatatggaaatttatagggtgtgaacaaagctatagtctcaggaaaattattttaatatgtatagaaaacagggccagttaaggactaggattcattccgacttcaccctgtgtgctcctgttcctagcaggttctcagtaaatatttgatcataggaatgtgtgaatgatccaaggagtgagagagtgaatgaataagcattcaacccttggatgtagaaaagctctaggaaaattaatggaaggcaaaaacaaaacacaaaactttgaaatgaaaagcattgcaccctatgaagaagaaactcaagcatagttgcctgttcattggtgttaaccactctccttttggcaggattgcctgctgctcttctgaatctgtaaatgccagatatttgatctcctagcttgccctgcatctggtcacacatataatagccctggatacggaagatctgtgcaaaagtctgcaaatgggcttcagttaaattttgtttcctaacaaaatgggagaaaatggtcttcttcaatacaagatgcatgtctgtatgtcagcgtgatacctggaattgtggccattttgcaagcagagaatcaagagtctgagactggcacagaataggttggaattatgtgtgtccttgacatttttgttttgttttgttttgttttgtttttgtttttcagacggagtcttactctgtcacccaggctgtattgcagtgatgggatctcagctcactgcaacctccacctcccgggttcaaacgattctcctgcctcggcctcccaagtaactgggactacaggcgtgcgccaccatgcccagctaatttttatatttttagtagagatgaggtttcactatgttgaccaggctggtctctaacttctgacctcatgatctgcccgccttagcctcatgctgggattacaagcatgagccaccactcccagccaacattgttgatatgatgaaacaatgaagaactgccctttccctggacttggtgcgaaataagaaactgcaggagtatgttgtaagtttatttttatttttatttatttatttatttgagacagagtcttgccctgtcgcccagactggagtgcagtggcacaatctcgactcactgcaacctccacctcccaggttcaagcgattcttgttcctcagcctcctgagtagctgagactacaggcgcctaccatcacgcccagctaatttttttctatttttggtagagacagggtttcaccacgttgcccaggcagatcttgagctcctggcctcaagtcatcagcccgcctcagactcccaaagtgctaggattataggcgtgagccaccgtgcccacctgcatatgttgtaagtttatactccactttttacaatatatctgaggcctggaaagttatttttaaagacatttttatatatacacacattcaactttcgtaaagtttatattcagctttttatagtacatctgacattgtagaaaagcattttcttatatatagttgaaatatatattcaactttgatttagtaaagtatatgaaaaacataatttacattcagcattttatagtgtatgtttatattcagctttttatagtatatgtgaaatcctagaaaagtattattttcctgaataagaaccaggaagaaactgattaaagagctataccacataatttctctagtactagattatcttacagtcttctacctcttcaagatacaaaagtcatggctgtgaggctatcattacccttttaccaaagttggaaaaggacagcatccaaaataagtcagctataaaaaaaagtaaagtcggccgggtgcggtggctcatgcctgtaatcccagcactttgggaggctgaggcaggcggatcacttgaggtcgggagttcgagaccagcttggtcaacatgatgaaaccccttctctactaaaaatacaaaaactagccaggcgagatagcacgtgcctgcaatcccagttagtcaggaggctgaggcacgagactagcttgaacccaggagacagaggttgtagtgagctgagatcgcaccactgcattccagcctgggcgccagggcaagactctctcagggaaaaaaaaaaaaaaaaaaaaaaaacaaaaacctgatgtgtatgcttccatgctttgcccacactaaagaagcatacccacagctagatttgttttggtaccataggaggtttcaggttggggagagtagtttgaatgacatcgtgcatacacattgaagtgtcatctcctctcctcacttggtaacataccagggacatccttcaaattaatacctgtagatcaaactagcttgaaattcttacataatggagtagttcccccttatccctggttttacagtatattgttttaattgttctattattggctattagttaacttataagttttatcataggtatctatgaataggaaaaaagcatagtatatgtagggtacagtactctatacagtttcaggcatctactggggatcgtggaacatgtaccctgcagataaaggactattctatagacaaaccatatgcagcccatttttccactaatgaaagttcagattggggccaggcatggtgctcatgcctgcaatcccagcactttgggaggctgagccaggtggatggcttgagcccaggaatttgagatcagcctgggcaacatggtgaaaccctgtctctataaaaagtaaaaaaaaaaaaaaaaaaaaagtcaagtgtggtggtgagcacctgtagtctcagctacttgggaggttcagggtggagaatagcttgggcccaggaggttcaggctgcagtgagccaagattgcaccactgcacaccagcctgggtgacagggtgagacctgtctcaagaaacaaaaaattcaaattattttaccaataattatacaccaaacagttttgttgtacatatattgttgcatgttgtacttttatatcaataaagtaggtggagtcctaccagttgaattccttgcctacaacatagtggatttaaaatatattcattaatgccttattattgtctgaaatcattaatcttaatgggaatttatgtccatttcctgacaaattcaaccaggactgaacttttttttatgttgggtgaaggaaaagaaaaagtgccttcaattttcttttcttttctttttttttttgagacagagtctcactctcggcaggctggattgcagtggtgcaatctcagctcactgcaacctctgcctccctggttggagcgattctcctgcctcagcctcctgagtagctgagactacaggtgcccaccaccacacccagctaatttttgtatttttagtagagacaggagtttcaccatgttggccaggatggtctcaatctcttgacctcgtgatccacccgcctcagcctcccaaagtgctgggattacaagcgtgagccaccgggcctggcctgcattttcttaactgccagtgagattgagcatctaccatgtctaagggtcattcgagttctgtttctgtggattgcttatttttatctcttccttttgtttacattggagtagtttttaaagcaatctgtggaaactttgctaaggagattgtattgtcatatgctctgcagtttagcctgcatcttttgccatcgtttatggcaaacagagttaacatatttttctgtgaagagccagatagtaaacatgcaaggctttgtaagccatacagtctctactctgtctttgtagtgtggaagcgcttaatacataagccaggtgttctcaaacaggggccatttcgtttctcatacctacaccccagtaggcatttggcaatgtccagagtcatttttggttttcagtatgaagggtgggtgctgctggcgtctggtgagcagaggccagggatcctgctaagcgtcctacaatgcatagtacaactgcccccaccccccaaaaaaagtctcatccagaatgtcagtagttctgaggttgagaaattctacctataagcaaatggacattgttgtgttccaataaaactttatttacaaaaaataatcagaaggccacatttggcctgtgagctatagtttgcttatctctattttaaatagctttttgctatatgataatatagttttctgtatttgttcctgaattgtctcattcaccccaaatatttttccaaattttcttctattttatgcctttaaacctttactaaatacaaataatacacagaaacaatagcccctgtgtaactaccacctaataattaagcatgttgttttattgttttgattaaaaatttataaaagaaataaatcatttcagaaaaaaaagtgtagtcttctctttttctctttccagtcctgctctttgccctgtgtctgcacagcaataacttagtgcactaatatctgtaaaaccagcacgtatccaatgtacaaggacatgatacatactattatgtgcttctaagtaacacaaatggtgatacatctttctgcaatttcattaacaatatgtgggatccaaaaccattgaaaaatactgatctaattcttttatctgctgtgttgccttcttatttatttatttattttttgagacggagtctcatctcactctgtcacctaggctgagtgcagtggcgccatcttggctcactgcaagctccacctcccgggtttacgccattctcctgcctcagcctcccgagtagctgggactacacgcgtccgccaccacgcccggctaatttttttgtatttttagtacagacggggtttcactgtgttagccacgatggtctcaatctcctgacctcgtgatccgcccaccttggcctcccaaagtgctgggattacaggcatgagacaccgcgcccggcctgtgttgcagttttatacaatttattcactgaagtccctttattagagaaaaacagttgtaaatttaaaaaactatatattttaagcactcaggatttaataaaggatttttgtaatttgaagaatgttcagtagagccaagaaagcttgtgggctttacaacctagaaaaaagttgtaagcagagaggcttagatccactacggtactgttcaaggaaaagtgtcagggctactactacccactgctcatcacctagtggttgagggcctggatgctgcaaacttccacagtgagcagttctaagcaaaccccaaaggccgaggaagctgaggggccaaaggaagaggctgaaaaatctagtttcttggaaacatttttttgtttggtttgggtttttttgttgttgttgtttgtttgtttgagatagtctcactctatcgcccaggctggagtgcagtggtgccatctcggttaagcaattctcctgctgaattcagcctctcgagtcgctgggattataggcgtgtgccacctggctatatttttgaatttttagtagagatgggttgtggggaaaagcaagagagatcagattgttactgtgtctgtgtagaaagaagtagacataggagactccattttgttctgtactaagaaaaattcttttgccttgagattctgttaatctatgaccttacccccaaccccgtgctctctgaaacgtgctgtgtcaaactcagggttaaatggattaagggctgtgcaggatgtgctttgttaaacaaatacttgaaggcagcatgctcgttaagagtcatcaccactccctaatctcaagtacccagagacacaacacactacagaaggccgcagggacctctgcctaggaaagccaggtattgtccaaggtttctccccatgtgatagtctgaaatatggcctcgtgggaagggaaagacctgaccgtcccccagcctgacacccgtaaagggtctgtgctgaggagaattagtataagaggaaggaatgcctcttgcagttgagacaagaggaaggcatctgtctcctgcctgtccctgggcaatggaatgtcttggtataaaaccggattgtacgttccatctactcagatagggaaaaaccgccttaaggctggaggtgggacatgcgggcagcagtactgctttgtaaagcattgagatgtttatgtgtatgcatatctaaaagcatagcacttgattctttaccttgtctatgatgcaaagacctttgttcacgtgtttgtctgctgaccctctccccactattgtcttgtgaccctgacacatccccctctcagagaaacacccaataatgatcaataaatactaagggaactcagaggctggcgggatcctccatatgctgaacgctggttccccgggtccccttatttctttctctatactttgtgtctttttcttttccaagtctctcgttccaccttacaagaaatacccacaggtgtggaggggcaacccaccccttcaatgggttttcaccatgttggccaggctggtctccaactcctgctctcaggtgatccgcccacctcggcctcccaaagtgctgggatgacaggtgtgagccaccacacccagcatctcagaaccatttaataaaaactaggaacagaagtcatgtcgcatgcagctgcaagatggtggatccctgcacaattaccccaaagttcctggctttatataccatagggaatttgcctaagggcgggactataataagtatggttcgtgagcaaacatcaaggttgtttgacctaagggggagaatttaaggtaagtacataaaagtacatttaaggtgttcctggaactggggctaatcaagagtcaacatggtagattagcatccaagatggagttgctttaacccccggcggagacccaagcctgcgccttgaagctccttctccaccggtagaagtcgactcaaggaggtcgtgaggacaggactcctgggggtcccgctctggggcacccgtagccctctcttccacagcgccctcctactggactcccgctgtagccaccgccgtgactgcagcaagtgcaccccctcccccaaccccgaggccgccgcgccgccaccgttgtttaaagaagcctctgcctgacttccgggagcagagcgctggacggacaagccaatgcgcatgcgcgaggcgccggctgtttccccgttcacaatgacccccacggttgcctaagaaaccagtccctgaggcttgggaaagcaggagccctccgcggcagtgcgtcggtgtcgaggctccgaggctccggcctcacctctccaggaggtcgacagaacgacaggacgttctccgaatgccaggagtcgcagagggcagagcaggatgaagaaaccacaggcggagtctaggggaagcagtacggcgtccctgcctcaggcctgcccggacggtgtgcgggtgagtctccccaaaagtcgtgcccctgtcaattcgaggacaggtctgcctgtgtgcctgtaggctactctctcacccgagggtcgttctcacagagagcagaaccccgcagcctcaggagttgcctggggcgggcggggggggatgtttgtgtaccactgctgtgtgtgtgtgtagtgtgtgtgtgtctcactttcttctctctctctctccctctgtttctttctctgtgtgtgtgtccgtgtgagtgtgttgtcacgaatgtgccctgtgcgccaaagggcaatttcttgcatgtcggcctgtctttggtgagcctctttctgcatctctgcctgggtcatgtggagatgcttcggacccagaggaattgaaatctcatccccagcctgagtggcagcttttctaggatcaagaccacacctcagccaaggacaaaagcatcagaagagctcattgtcctgagggaggggagcagaccgacgtcaaagatggttttaagtccgcgagactcttctctgacaaatgaagccacaccacgacacaggcttaaagaagaagccgggaacaggacatggcaaggatccctgtcactggaacactggcctttctggacaagtcacccgtttggcactcctccccgggtgcccgttgcggtggcactgtgctgtatcctgcctgggctctggcctctgctctgtcctccctcttgctgtgtctcccgtttctgaggggtgcagatgcttcttggtctgcctcaatgtcttcaacaaagaacactttccagtccatcagggagaaacttcaaggagatccatgtcatgattgtttccctctgcaaacttgtttctggtggattgggcacgtgtgaagatcctggagctctgggcatccatacctgtctcagacagggaagctcccttggtctccatgtttcacctgatggctgcgtagtttccctacaatgaatggtaggcgaccgtggctggccttggcttcaagagaggcggtgtcacatttcctctgcatttcctgtctcattcttaagggacatctgcttcctctgctcctgggtggactgcctcccagaactgaatcttttggcagccaataatgtcagggagccaaagggactgggctggggctgggtgcatgggaggttgcgttagggctacctaggcggtggagggatggaggtggagtgatctttacagaaacctctccgctcctccagcaggctccccaaaatgtggcttggacttacgcacagggcctcttctggttcccagctgtgctttgcttttccttggcattgttggggaggtcacctgtgccccccttccaccgggcacatgcctggacaccagtgttcgtctcgccatcgccccatatggcctcggtgacacacactcaccccatctgctctgggggacgccagtgccacgtttggtcacattggctccacctcggactcacccctgttcttgtttgcatgtctcctggaaagcggtggcggcacacagcagccccaggactttggcaagcggggcaggccactgcacctcccagggaggagggaggcagagggctcatgtttcagtgaattttcagctgacaccatgccttcaggcccatgggatctttctgtgccccagcgaggccctgcctgcctcaccagatgaggtgagcccatccctggtcacctggtgggatccaaaatcggatctgaagaggagtactgagaccccagcaggcgccctgaacctcctcttccactggtagaagttggctcaaggaggccctgaggacaggactcctgcgagtccggccctagggcgcccgcagcccccactccctcgccgccccctacttgatcccggattcagccaccaccgcgctgcagcaggagcccctactgccgccgccattgttcgagggggcctcagcctgagttccaggagcagagcacgagtcggcctaggcaatgcgcatgcccgaggcgcgagaggattatcccgtcacagtgattcccacagttgcctgagaaaccagtccctgaggcttggcaaagcaggagccctccgtggcagtgcttgggtgtccgggctccgagactccggcctgacctctccatggggtcgaaaggacggtctctggatgccaggagtcgcggagggcggaccagcatgaggaaaccattggcggaaaatggcagaagcagtgcggcatcccagcctcaactgccgggacggtgttcaagtgagtctccccaaaagtcatgccccccgtgatctcgacgacatgtctgcttgtgtgcccgtgggctgctctctcacttgagaatcgttctcgcaaagagcagaaccccgcagcctcaggggttgcctggggctatgtgtttctgtgccactgctctatgtctgtgtgtgtgtgtctcccattctctcttctctctctgtcactctgtttctctctctctgtctgtgagtgtgtgtgccggtgtgcgtgtgtgtgttgaatgaatgtgccctgtgcatcaaaaagcgatttcttgcatatcggcctgtctttggtgcgcctcttgctgcgtctctgcctgggacatgttgccggttgtcaatcggtttcgcggcagttccactttgggtttctaaaggcctcgacgacgtgaggagaggcgtcggtcctggaggaactgaaatttcatctccatcctgagcggcctcttttctaggatcaagacgaccacactccagccaaggacaaaagcctcacaggagctcactgtcctgcaggaggggagcagacaaacgtcaaagaagatggttctatctcctcacggctcttctctgaaaaatgaagccacaccacgacacaatcttcaagaagctgggaatgggacatggcaaaaacccctggcctctctggacaagtcacctgtttggcactcctcccctcagcctgtggcggtggcactgtgctgtatcctgcctgggctctcgcctctgctctatcctccctcttgctctgtctgccctgtttctgaggggcctagatgcttcttgttctggttcaatgtcttcaacaaagatcacttcccagtccaacagggagaaagtggtgatccgtgtcatgattgtttctctctccaaacccgtttctggtggattgggcaggtttgatgatcctggagctctgggcatccatacctgtctcagacagggaagctcccttggtctccatgtttcatgggatggctgcgtggctggccttggcttctaggaaaggcggtgtcgcgtttcctcttcacttcatgtttcattcttgagggacatcctcttctgagctcctgggtggactgcctcccagaactgaatcttttggctgccatgaatgtcagggagccaaagggattgggctggggctgggtgcatgggaggttgtgtcggggctacctaggcattggagaggtgggggtgaagtgaactttgcagaaacctctccgctcctccagcaggtgtagcaaaatgtggcttggattcacgcacaggccctctcctggttcccaggtgtgctttgcttttccttgacgttgttggggaggtcacctgtgccccccttccaccaggcacatacctggacaccattgttcgtctcgccatcgccccatatggccttggtgacacacactcaccccatctgttctgggggacgccagtgccacgtgtggtcgcattggctccaccttggactcgcccctgttcctgtttgcacgtgtactagaaagcggtgtcttcttgcaggagccccagggctttggaagcggaacaggccactgctcctcccaggggcgagggaggcagagggctcatgtgtcagtgaattttcagccgacaccacgccttgaggctcatggatctttctgtgccccagcgaggccctgcccgcctcacagatgaggtgagctcatccctgcttacttggtgagatccaaaatctgaagaggagtcctgagaccctagcaggcgccctgaagctcctcctccaccggtagaagtcggcacaaggaggtcttgaggacaggactcctggtggtccagccctggggcgcccgcagtcgcctctctcaacgaagcccgctcctcgaccttggatccaggtgccctcctaccgccgcgccgccgccattatttaaaggggccgcagcctgacttccaggagcggagcgcgagtcggcctagctaatgcgcatgcgtgaggcgcgaacagattctcgtcacagtgattcccatggttgcctaagaaaccagtccctgaggcttggcaaagcaggagccctacattgcagtgcttgggtgtcggggccctgaggctccggcctgacctctccagggtgtcaacaggatggtctgcggatgccaagagtggtggaggtccgaccaggatgatgaagccacaggcggagtctgggggaagcagctcggcatcccagcttcaggcctgccgggacggcgttcgagtgagtctcccagaaagtcgtgcacccccgtgacctcgaggacaggtctgcctgtgtgcccgtgggctgctctctcacccgagagtcgttcttctggagagcagagccccgcagcctcaggggttgcctgggggggtgtgcttctgtgccactgctatatgtctctgtgtgtgtgtgtgtgtgtgtgtgtgtgtgtgtgtgtgtgtgtgtgtctcccattctctcttccatctctgtctctgtttctgtctctttcttactttctttgtctgtgcgcccgtttgcgtgtgtgtgtgttgggacgaaaatgtcttgtgcaccggagtgctgtttctttcttgtaagcctgtctttgttgagcctctttttgcgtcttttactgggtcttgcggcccattgtcagttttccctgccgttccactttgcattttgtgaaagcctcggcaacatggggagcatcgtgggtcccgcaggagttgaattctcctccccatcctgataggcctcttgtccaagatcaagacgaccaccccacacttaagcacattttttaaaggggtcgcagcctgatgtttaggagccgggcccatgtagacctggctaatgcaccttactcgcctctcactgcctgtcacttcgtccacagcagcccccgctcactattttttaaaggggccactgacgggattacaggagccaggcgcctgtcggccttgccaatgtgcatgctcgtggcgtgtgcaggttctcacgtcttaatgatcccctccatcgtctggggaatgggtccctgaggcttgccgatcacaatcactccgtggcagtgcatccgtgtcaaagcttttgcctgacctctcaacgtggttgacatgattgtctctggatgcccggatttgaggaggtcaccgaccaggatgaaaaaacctcatgcagagtcacggagaagcagcgcgggatcccagcttcaggggacagatggaatctccggactcccatttggatctgattttggatcccacccattgagcaggaatggggttacaatctggtgaggcggggagggcctctctggggcacagaacggtcccacggacctcaagccatggtgtcagcttaaagttcattgactcatcagcccactgcctcccttctccttggacggagcaatggccttctctggtttccaaaatccagggactcctgtatcctgacactgctttctgggaccagtgccaacagggccaggggtgagtttgaggtggagcaaatgcgaccacacgtggcactggcgtcccctatgagcagatgtagtgagcgtgtatctccaaggtcgtttggggtgatgtggagactgacagtgatgtcctggcatgcgctcagggggctatggggaccttcggaagaaagccaaggaaaagcaaatcacacctgggaaccaggagagggcctgtgccggagaacaagcccattcagggaggcctactggaggaggcgagaggtttctgcaaagtacccttcacccccacccctccattgagtaggtacttctcaagctgtctttccttcacccagccaaaacggaaaatcgttcctgcctttttaggacagcagtgctgagcagcaggattccctgagctttgagaccaggacggtgccctgggaggcccaggtcgaagggaggcagtgagctcatgaaacagggaattttcagctgactccctcccctgggatctcagctgttactgtgccccagcgacccccttcacacctcaccagactgaataaccagccccatgggacccgatttctgcccataccttccaatccggaatcggagcagaagagcagtcccgagtgcccacctcacggtctgaagcgcctcctcctccaccgggatccgaacacgaagtcggcttaaggaggccctgaggtcaggactcttagggtcctgcgctgcttgtcgcaagcagcctcctcccccaagccgccgccggtccatctctagcattttcctggggctgccgcctgacagccctgacattgcagcgcgcgcgagccgaccacgacaatgcgcatgcaccaaacgcgaggcaccagggcaagctctgagccagggctggcctcccagggaccaccaccattgcctgggcacgggtcccagaggcttggcagatcaggagccctctgtggcagtgtgtagagttgggctgatgtctctcctctctgagggatcagcacggtgatcccacaatccttggagactggcagggccgaactaggctgaagaaacgtcaagcagggccccaagaatgcaccacaggatccctaaggatccctatgatgtatcaggcctgcctagatagtttaggggtgaatctccttgaaagtcgtccccccgggatttggacatacggcctgcctatgtgcccgagggctgctctctccccggaggggcttcctggcagagagcagaaccacgcagcctcaggagctgcctggctgtgtgtttctgtgcgagtgctggatgtctctgtgtgtgtttctttctgtgtgtgtgtggtttcttgtgaaacaaatgtgactcgtgcgctggagcgcggtttctctcaagtccacctaccttctgatgctcctcactctgtggctccgcttgggctgcggggccccacgtcctttgttttgcttgtagttcctgaagcctcggagaagtggggggctggctccaacccacaggggtccaaatcatctccccaccccggggagccactcttctagaaagaagatgagcacaacacacccaagaacagacgcctcctaggggcccatagtcctgtggcacatccagggctggaccctagctgtcctgtcctcaggatccccttgagcccacttcaaattccgttgctggcagggcaggagcttaaggatgtcagatgggcactcaatcttctttcagttccattccgggtcaaaaagaaatgatgtgtgtagaaataaggtgagacaggggtgaggatacagtctgatgaggtggggaggaggtcccacaactacaccagcaggacaggtgcagatagatgtcaaagaagctggttccaactcattctccccttcctcttcactgcataacctgtccacaccatggcctggtgctggtggaagaagacatgaatgtgaggagaatatttggactgcaaactgtggcctttctggccagcttccaggttgggccctcattcccggagccacatgcgagtgggatggattgatcctgcgcgggctctggcctcttctctgtcctctcttttcctgccttccatgtttctcatgggcctagggtttccttggtctggctctacattctctacaacaaacttttcccagttagttgaggatgacctttctgaagatccatgtcatgagtgtttcctcctcaacacccacatttcctaatgactgggtagctgtgataattcttgaaccgtgggtgctcgtagctcccaccaacagggaaacttttggtcctcctattccgtcagatgactgcatgattcccataggatgagaggtagtcagccatggctggcctttgccttctaatctaggctgtgtttcatttcctctgcacatcctttcttattgttgagtgatctcccatttctctattcctgactggaactgcctctcagcacggaaccattggctgttaggaatttcacagagcaaaagggactggcagttgactgggtgcaggccaggtggtgagtagtgatccggtgtggggtttggggtgttttgcactttgcacctcttggctcctctggctggaatccctgaacggggcttggactctagcacaggcccctcctgtggtcccagttgtgctttgcttgtccttccctttcttggggatcctcattgcccattgggagcatgcccggacatccttctgaggcttggattcaccccatatggcctttgagacacactctcaaccttatctgtccccatggattgccagttccaggtgtggccaccttggctccactttcagcttgcctttgtcctcgttcccgttgctactggacagcagtgctgaggagaagcaggagcttctggcagccagacaggcatgtttgctgaggcactagtttgcatgacgctactgggacccctcggaggatgattttggtagtagggccaaggccaaacaggttagtagccaggctctatgggacttgggttgtttccaagtctgaagcaagatgactgctgggtctacaacctagatatgggtcactgctttcaaaacaaccctcttaggtcttgggatccacaagggtttcataacctcctacatgaatcccaaggctcccagagagagacttttgccaatggataagtgcagaattcttactattgtggggggatatgagcaggtgaccacatatttcaccatcttgctaacatcatcaccatctgtttcctttattgtataataaactagtaaacctaagtgttttccacagatctgtagccattctagcaaatgatgcaactaatggagaggatcatgggaacttctgattcagtcattcagtaagacgtacaggtgacatctggacttgtgattggtgtctgaagtgagagtagtcttgtgggactgagcccctggcctgtgggatctgactctaaatctgattagtgtcagaattgaagtgcaggatgcccaattggtgtgcacaaggaaaagccccacacaagtggtatgagaagtactgagagtggcatgagtatagaaggaaaacctgcttttgcagatacagtggcatacatacaatccttttgtataaccagggttatacaccatgaccaagtagaatttattcttggaatgaaacaatggttaaatatttgaaatcctaacgtgtaatatatcacattaagagtgaaggaaaaaccccacttgattatctcaattcacgcaaaaagtttcaaccaatttcaaaaaccattcatgattttttaaaaagtcatgcaacaaattaggaattgaaggaaactacgtcaacataataaaagttttatgtgaaaaacccacagtggacagcacactcggtgaaagactgaaagctttttctccaagatcaggaacaaaggaagaaggcctgctgtcaccatgttcattcagcagagtactaaaagtactagctacagaaatgtggcaaaaaaaacaacaaccggcatccaaattgaagacaatgaaatgaattttctgtgtttgcagatgatatgatctaatgtgtaaaaaacccaaaagactccataaacaaaaaacaactaataaaatgaattcagcagagtgccaggatggtcaacacacagacaaaaaaaagtttcatttctatacaattacactgaagaacacaaaaaaaagagaaaaccatgccattcacaatagcatcaaaaagaataaacttcttcaaagttaaccaacaaattgaaagacttgtccaatgaaaactacatatcattcctgaaaaaaaattaaagacataaactgaaaggcatccccatgttcatggattgggaaatttaatattgttaatatgtcaatactatctaaagccatctacagatttcatgtaatccttctgaaattctaatgacattttttgtataaacggaaaaatctatcctgaaattcatatgaaacctcgtgggattccaagtaggcaaaacaaccctaaaaactaggaataaagctggaaaaatcacactttctgatttcagaacttactgcaaaatgagagtaatcaaagagtccaatattaatcaatgcatatatagccagatgcttatcaacaagggtgccaagatcagtcaatggggatatgacagggttctgaactgtgctaggaaaactgggtatctacataaaaaagaataaagttgaactatttttattttttgtttgtttgtttttttgagacagaatctgtgtcgcccaggctagagtgcagtggcatgatcttagctcactgcaacttctgcctcctgggtttaagtaattctcctgcctcagcctcctgagtagctgggattataggtgtgcaccaccatgcccagtgaatttttttatatttttagtagaggcggggtttcaccatgttggccaggctggtctcgaactcctggcctcaagtgacccacccacctcagcctcccaaaatgctgggattacaggcacaagtcactgtgcccagccaaagttgaactcttaatgccatatacaaaattagcttaaaatggatccataaactaattgtgagatcaaatgctttcatagcactgcatttggtaattttttttggaggataccaaatgtacaggcatcaaaagaaaaaacagacaagttgaaattcatgaaaagtaaaaaagaagtgtgaatcaaaagacatcagtagatttaaagggaaacccacagaatgaaagaaaatatttacaatcataaacctgataagggattaagatgctaaatatataatctgtaaaatccaacaattaaaagggtccaaaaatctgccacagacttcagagacttcacgtctctactaaaaatacaaaaattatttctccaaagacatacagatggccaataagcatgtaaaaagatactcaccacactaattattagggaaatgctaatcaaatctataaggagatactactttatctccattagaaaggctgccgttaaaaaacagaaaataagagctgttggtaatgatatagagaaatgggaaccctgaggcactattgcagggaatagaaaaaggtacagccactgtgaaaaacagcatggcaattccttaaaaaattgaaaatggaggccaggcgtggtggctcaagcctgtaatcccaacacttggggaggctgagatgggcggatcacttgaagtcaggagttcaagaccagcctggccaacatggtgaaaccccatctctactaacaatacaaaaattagccaggcgcagtggcatgtgcctgtaatcccagagggctgagacaggaaaatcacttgaacccagaaggcagagtttgcagtgagccaagatttgaccactgcactcccaattgggggacagagaaagactcatctgtcacaaaaaaaaaaaaattaaaaatagaattaccatatgatccagcaattccacatctaggtagacactctgggaaactgaaagcagtttcaaagagatatttgtacacccacgtgacagagcaggagcatcgccatcttggacaaacaccgccattttaaattccccttggccgagcgtggtggctcacgcctgtaatctcagcactttgggaggctgaggagggcggatcataaggtcaggagatcgagaacatcctggctaacccggtgaaaccccgtctctactaaaaatacaaaaaatgagccgggcacagtggcgggcgcctgtagtcccagctactcgggaggctgaggcagaagaatcgtttgaacccgggaggcggagcttgcagtgagcccagatggcgccactgcactccagcctgggcgacagagtgagactccgtctcaaaaaaaaaaaaaaaaaaaaaagtttcccttgattaaaaactgcctaaatccagcccaaaaacacaacataatggctaatgtcagcatgaccataaaggacaaatgacacttctgaccagaaacattccaaccccgagataaacctccctctgaacagaaacattgcagccccacaacaaaactctcctctacccaaaaatattccaaacttgcaataagctctcactccctaaacccttaaatatccttattctgtaagagagaacatgcctggcctaaatcggccagaagcccctctcaggtttattttcccaaataaacctgtctttgacggtcaagctgcttttcgtgtttgtttcttctttctttaatccttacaccatgttcatagcagcattatgcacaatagctaaagtagaggcaccccaagtgtcccttagtcaatagatacataagtaaaatgcagtaaatacacacagtgcacattattcagcctttaaatagaaggaaattctgacatatgctgcaacatggatgttaagaatattatactaaggaaataagcctgttataaaataaacactgtattattccacttatatgaggtacttacaacagtcaacattatagaaacagatagtagaatggtggttggcaggggttgggggaatggggagtcattgtttaataggtatagagtttcagttttgcaaaatgaagagttctggaaataaatggtggtggtgtttgttcaacaatatgaatgtccttaataactctgaacagaagtgtatgctttaaatggttatgacaccaaattttatgtgtatttcacaatttttaaaaattaggaggaaaataacccagccaaaatcatgagcaaaagacgtgtaaaccaggagttgagaaactctttctgaaaaggtcaagagtgctttcctgttccacagagtctctgtactgactattcaactctattataataggaagaaagcagccatagacaaaaagtagacaatgagtgtgctaatcttgcaatgaaacattttttattttttattttttttgaaacgaagtttcactcttgttgcccaggctggagtgcaatggtgctatctctgctcaccgcaacttctgcctcctgggctcaagtgattcttctgcctcagccttccaaatagctaggattacaggcatatgccaccacacccagctaattttgtatttttagtagagatggggtgtctccatgttggtcaggctggtctctaactcttgatctcaggtgatccgcctgcctcagcatcccaaagtgctttgattataggcatgaaccaccacactgggccgaaatatttaaaaagttgcatttggttactggtcagagtttcccaatcaaatgcataagctggttaccactttgaaaatgagtagttgtaggccaggagcagtggctcacacctgtaatctcagcactttgggaggccaaggcatggggatcacgaggtcaggagttggagacaagcctgaccaacatggtgaaaccccatctctactaaaaatacaaaaattagcatggcatggtggcgtacacctgtagtcccagctactcgggaggctgaggcaggagaatcgcttgaacccaggaggtgaaggttgtggtgagccgagatcgtgccactaaactccagcctgagcaacagagcgacagtctgtctcaaaaaaaaaaaaaaaaaaaaaaaaaaagaaaagaaaaaatgaatagttgtacattactgagaaaattgaaaaaatctgaatttggattcaattttggaataggaaattattactaattttcttatgtgtgattatatgacactttgagtaaacaggaaattgtttttggggagatggactcatgtatttagatgtagaaaattatatcatccataacactgtcaaattatatatcaaatgtataggggcaaaaaaatctaatgtggcaatatattaatatatattttatttgctgcaattttaaaaacttttctatatatttaaacttaaatatataattaaatgtataataaaagtgtaaaaattgcaaactagataatatttggttaatttctaatgcattttgaattgtgcaaaaggaatataaattattattttcacacttttgacattttaaaaatttgtacatctgaatttcattccaggattaagtgtgtgattcaccttgacattcgaatgagaccctctcatggtttttacttgcttgagtttatccagaatgaattcaaattcaaaaagggatgagtaattacatgaaatgcttctgaattctgtcattcttctgaattttatctcatcaaaatccactaacaattccacagaaatgaaaaaaattaacaaaaaatagcacccataatgatatcacaaatggaagctaatatttattgaacataacagtacattctagatagtgttccatgtttttttcatgtattaactcatgtaatacagcaatatactgtaggtactactatcgccatttacatatgatgcccagaggggataagtattatccccaatatcatattggctgtaaggagttgaacgctgatgacgatcattaagatatgtagcatgggggcaggcgcggtggctcacgcctgtaatcccagcactttgggaggccgaagcaagcggatcacaaggtcaggcgttcgagacaagcctgaccaacatggcgaaacccaatctctactaaaaaaatacaaaaattagccaggcatggtggtgcacacctgtaatctcagctacctaggagactaaggcaggagaatcacttaaacccaggaggcagaggttgcagtgagccgagattgcaccacagcactccagcctgggtgacagagcgagactccgtctcaaagaaaaagaaaaaaaaaagatctgtagaatgtctaaagccttttccacatcacacagctctgtttgatgacttttcatcaatttaacagtaattggtgctggaagacttttacatacaaagtataaagagcaatgcaatgctttcctatatcctctcaattttcctctattacgaatggttcgataatgcaaaaatagaagaatgccagaaaaggttttcttttctttctttttttttctttttgagatggagtcttgctctgtcgcccgtgctggagtgcagtggcgcaatcttggctcactgcagcctctgcctcctgggttccagggattctcttgcctcagcctcctgggtagctgggattacaggtgcacgtcaccatgcccagctaatatttgtatttttagtagggacagggttttgccgtgttggccaggctggtctccaactactgacctcaggtgatccacccctcttggcctcccaaagtgctgggattacaggcgtgagccactgtgcccagcccaaaagaggttttcttgtgttgttataaaaatacattataaactatctgaatctgagtaacatttgggttcagagctaaaaaatgacacattactgacattttgaaaagttcacaccggtacaaacaaattgatacctaataagagcttaaccatatctaaaagccttcccgtgtagtctttatccaaattgtttctcagtggtataaatacattgacacactgtacatatatacatatacatatatatgggtccctcctcttggccaagggcattccagagttacctgaaaatctagatcaggccatgatggaagaggggttttcatatgcctcatgatacccctccagcatgaacatcaacacagaccttaagtctgataagaaacatttgtatcctctctcaagcctgctacttggaggcttcatctgcagaataaaacctaggtctccacaaccccttttataacccagacataacctactgataactctttccaccgaatgcccatcggaaaattttaaaatctacctatgacctggaggcacctccttctagttgtcccacccttccagattgaactagtgtaactctggcatgtattgattgatctcatgcctctctaaaatgtgtaaagcaagctgtacccgagccactttggttgggcacatgttgtcaggacctcctgaggctgggtcacagggcatccttaaccttggcaaaatcaactttctaaattgactgagacccatctcagacattttgggttcacaaagggatttttttgtttgtttgtttttttgagacagagtctcattctgttacccaggctggggtgcagtggtgcaatctcagctcactgcaaccgccacctcccaggttcaagagattctcctgcctcagcctctcgagtagctgggattaaaggtgccgtcaccacacctggctaattttttgtatttttagtagagacggggtttcactatgttggctaggctggtctcgaactcctgacctcaggtgatccacccaccttggcctcccaaagtgctggaatgacaggcgtgagccaccacgcctggccttaatttttttaaatagagatggggtctcactatgttgcccaggctgttctcgaactcctgagttcaagctatcctctgcctttggccttgcaaagtgctgggatgacaggcatgagccaccacaccctgccgtaaagggcttcttaccactatgagtactctgatattgagcaaattgcccaaacacactaaaggccttcccacacttctcacattcatagggcttctctccagtatgaatactctgatgtgctttaaggcctgagttgagcctaaaggacatctcacatttgttacattaaaagggtttctcaccagtgtgaatattgatgttgactaagtcatccatacacactaaaggccttgtcacattccaaacatttatagggtttctcaccagaatgaaatctatgatgtacagaaagttggcggctagtcctaaaagcttccccacactctttacattcataggttttctcagcatcatctcttgttcattgaacatgtatatgaggctgaagggtgttttccttgttttctgtaacatctgaggagtaaggaaaggggtattttcttcttacctgtctgaaaatcttgtttttttaaagttaactgttgttgttttttttaagtaagattgatgttttctcaaaggtgagccttgaaatttgtaaaattggaattataagaaagagaaacctacaaagcacagacattaagacaaccaggtagcaacagaattaagttccttttataatagcagactaatggacaggtggtcttttttatcttctgtgatgatacattattacactacctatcatgtacttgtttctatggattatcttgattcatcttcagacctgtcatgtgtagtgagatggggaaacagaggcaccaagatgttgacatctcacaatgcagagctcagtatcactttcttagaggctgagaagacagcctgtctccttaattttaccaggataccacttaatttatgcatagatttttaaacctgtcttttttttttttttttttttttaagagacaaggtctcgctctgttgcctaggttggagtacagtggtgtgaacactgctcactgcagcctcgacctcctgggctcagcaatcctcctgcctcagccttccaaagtgttgggattacaaatctgaaccaccacacctggcctaagcctgtcttctttactgagtaattcatccttgatactatttacccatcgattatataatttaacatcaatcttattaataatggcataaggccgggtgtagtggctcatgcctgtaatccagcactttgggaggcagaggcgggcggatgacctgaggtcgggagttcaagagcagcctgatcaacatggagaaaccccatctctactaaaatacaaaattagctggcgggggtggggttggggggtgacacatcccaggctggagtgcagtggcaccatctcagctcactgcaacctccgcctcctgggctcaagtgattctcctgcctcagcctcccgagtagctgggactacaggcatgtgccaccatgcccggctcttttttttttttttgagagggagtttcactcttgttgcccaggctggagtgcaatggggtgatctgggctcactgcacctccgcctcctgggttcaagcgattctcctgccttaacttcccaagtagctgggattacaggcatgtgccaccacaccctgctagttttgtattttcagtagagatggggtttctccatgttggtcaggctggtctcaaactcccgacttcaggtgatctgcccacctcggcctcccaaagtgctgggattacagttgtgagccaccgggcctggtagcccagctgatttttgtatgtttagtaggtatggggttttgccatgttggccaggctggtctcgaactcctgacttcaagtgatcctcctgcctcagcctcccaaagtgctgggattacaggcgtgagccaccacgcctggctaaaaaaaccaaaaactttagataagtgaatttggaggaaatatttataacagataaaatggacaaacagataataattctaatttactgtctctctggcttaataaaatattagtcaataccctaagaagaaaggaacaaaataaaaattagccgttcacaaatacaaatagtcaacaaagaaagccaaaacctacgatctctgaaattggctcttgaatttattgaacatgcaatgacttcagattaggaaatttcaaaaatgttttttaaagtttcactttttggaatttaaaattaatccaaattatttaatattcaacatttggaatttaccaatcaatcctctttcattttatttttcacccttagaataattcctttttcaagagtttaaaacatttttaaaattaattgattctgcaggctgggcagtgagctgtgattgcaccactgcactccagcctgagtgacagaacgagaccctttctccaaaagataaataaataattgacttaatttttagaacagttgtaggtgtacagaaaaacagagcagaaggcaaattgagctctaatatccccctcacaccatagtacacacacttcctctattatcatcttgttagtgtggtatatttgtatgcttgatgagccaatattaatattattaagttcatggcttatattaagattcactctttgtgttctaccatttatggactttgacaaatgcatgaggacatatatccaccattaaagggtcacagagaaaagtttcattgccctaaaaatcctctgtgctccacctattcatccttccctctgctcaagcctctggcaaccactgaactttttataataccatctgcctagttttgcctttttctagtattttatataattggaactatacactatgtggccttttcacattggcttctttcacttagaaatacatgtttaagattcctccatgtctttccatgccttggtggttcatttctttttattcctgaagaatattccattgtatgattgtttcagagttagtttatgcatttccctattgtaggatatcttggttacttccaatctttgttggttatgtataagctgctgtaatcattcatgtgcaggatttgagtggatctaagttttcaacttatttgggtatgtaacaaagaatgcaattgccagatcatagggtaatcatatgtttagttttgcaggaatttgcaaaactgccttccacagtgactgtaccattttgcattcccagcagcaatcaatgagagttcctgttgcgccgtatcctcaccagcatttggtggtgtcagcgtttggatttgagccagtctaacagatgtgtagtggtatctcatctttgttttaatttgaattccctagtgacatatggtgttgagcatcttttcagatgtttatttttgctacctatatagcaaagggcagatacagatgatggactgcggggaaagagcttgctgtgatgataggaagctgcagtcagggatgatctcagggttacctgggcatcaactgtgctttctcctgtcacataaaatgtggtctacctgagttttgattggaaacagaataatacctggttgtccataaatatttctgactgaggcttgagatttatgtatgttttgactgaaaggtcatataagcccaatatataaacaggttggggtacaacagggaatgactgtcagagatgttgagagtctacactgaatggatgatgtcactgcctgcccatgtctttctcattatggactttcagtgtttatttgccacttgaaaggccactgagataggctacatctgatttttctcttgaggatctctattactgagaaatttctgtattctgggccacactgggttcataatctgactatatatatcatgtgtgtgtttgttccttccctaaaatgctcagttcagctgcagttctagaggtagatactactatgtttgtatttcagagagctgaagatctgaggtctggagaggttagtgtgtagaaagttatgttgaataagtggcaaggctatgtggccaggtcagataagctgccttcggattttgctcttgaacttctactggataatatcttttcataatagaaaagaggagagtgaacttaggtgttttgttcaaatcatcgactgtaggagttctttcaagatatgatgaaaagcaataattgtctcattttacattacctataattattgctcaccagaaattgattatcgatgcagcaaccttttacattcctctctgctttattatgcatggccgggcttcactgtaactaagagggtccaagattcagaaatatctttaacttgcaatgcttggtcacaggtatccaactgaaaaatattttgctcattagccatatggacacatatggtaaactacagccagagacacaaaataagaagaaagggcgatcagaagtcctgtgtctccttaaattttgtatttctattcaaatgcatctagagtcatgaggaagttgaggaaatgggaaatgcaaagtcctaatcaaagcattcccgcatttcagttatctgcattattgcacatttacatttataatgcatacataaaattcaattcaataggtataaaaatgttaagtaaccttttctctcatgcactccagtcattcagtagctcacttgagagtcaatattttaattttgttttgaatcctttaattttttttctttttctttttcttttttttcttttactttttttttttgaatcaaagtctcggcctgtcacccaggctggagtgcaatggcacgatctcagctctctgcagcctcagcctcccagattcaagtagctgggattacaggcatgtgccaccacacctggctaattttttgtatctttagtagagacggggtttcatcatgttggccaggcctgatgtcgtgatccacccgccttggcctcccaaagtgctgggattaccggcatgagccacgcgcctggccaatttttttctttttttaaatgaagttttattgtgtatatttaaggtacacaatataatgttataggatatatatatacatagtcaaagagttactatagtgaagccaattaaaatatctatcatctcacaggtacccacattttttggtgtggcaagggaagctaaaatctactcatttagcatgaatcccatatacagtacaattttattacctatactcctcatgttgtataaaagatgtataggattgttcatcctacgtatctgctactttgtatctctgacccacgtgtcctcatttcctcccttcctttctcactggtaatcactgtggttctctgtttttgttgttgttgttgttgttgttgtttgagagggagtctcgctctgtcgcccaggctggaatgcagtggcgtgatctctgctcactgcaacctccgcctcccgggttcaagcaattctcctacctcagcctcccgagtagctgtgattacaggcgtgtgccaacacaccaggctaattttttgtatttttagcagagacggggtttcaccgtgttagccaggctggtcttgagcttctgacctcctgatcctcccaccttggtctcccaaaatgctaggattacaggcgtgacccactgcatccggccttctatttctttatatgtgaaaattattttcagattccacatgtaagtaaggtcatgcaatatttttctttctgttgttggctaacttcacttggtataatgccctccaggctcatccatgttgtggcaaatggaaagatcttgttcttttttagggctgaacacagaagttattttcatatacaagtatgcaggtgccatacacacacaaatatgtatgtatatatcatactcacatacaatttcaaatacatctatgtgttacatgcatatataagtatttctgtattttcacagaaatgtcactctaaatcagtacctagggagggtcatcgttttcttgagctacaaagcaagacacagtatgagtggctgcaccctagtttaataagtcctctaagtcatattgaggatttttcctgttttctttcgttgttgttgttttattttgctgtgttttgagactgagtttcactcttttgagtgaagtggcatgatcttggctcactgtagcctcccaagtagctgggattataggtgcccccccaccacgcccggctaatttttgtatttttagtagaaacggggttttgccatgttggccaggctggtctcaactcctgacctcaggtgatccacccaccttggcctcccaaagtgctgagattacaggcgtgagccaccatgcttggctgctttcaccatttcagactgagcttagagaagaacctgaggaaaaacatgacttcataatttgatgaatggagaaatctctttccattcaccctcctttgctctatttcattcttattgtgaaatttgcaaacaaagatgtggatacattggttattaaataaacatctgtgtgatacctatccaggtgaagaaatagagcacaaccaacaccaagaagtcctctgtatgcccctaactgatcctaaagtcttccttccccttattagtaacagatatacagatatccacattacctgtggatatctgccatcctctccttgcttctctttgtaattttattatgcattttcttttctttatttttttggacacggagtctcgctctgtcgcccaggctggagtgtagtggcatgatctcggctcacggcaacctccgcctcctgggttcaagtgattctcttgcctcagcctcccgagtagctgggattacaggtacaggccacgtgccaccacacctggataatttttgtatttttagtagagacagggttttgcatgttggccaggctagtctcaaactcctgaccccaaaacctggctttattatgtattttttatgtgcctaaagtctgattttgcccggtttttctcttacataattggagtaatagtttgtatcctactgcatctggcttcttttactcaatattaagtatttaagattcacacttagctttgtttctgcattctattaaaacggtacaccagccaggcgtggtggcttacacctatgatcccagcactttggaaggccgaggcaggcagatcacttgaggtcagcctcaggagttccagaccagccgggccaacatggtgaaaccccatctctactaaaaatacaaaaattagaccgtgcggtggctaacgcctgtaatcccaatgctttgggaggccaaggcaggcagatcacggggtcagaagattgagaccatcctggcaaacatggtgaaaccctatctttactaaaaatacaattagcctggcgtggtggcatgtgcctgtagtcccagctactgggaggctgaggcaggaaaaccacttgaaggcagaggttgcagtgagccgagattgcgccactgcactccaacctggtgacagagcaagactctgttaaaaaaaaaaaacccaaaaaactaaaattagccaggcgtggttgtgcgcacctgtaatcccaggtacttcggaggctgaggcatgagaatcacttgaacctgggaggtggaggttgcagtgagccaagatcgcgctctgcactccagcctgcgcagcagagtgagactcggtctttaagaaaaaaaaaaaaaaaaggctgggtgccgtggctaacgccagtaatcccacagtttgggaggccaaggctggtggatcaccagaggtcaggagttcgagacaagccttaccaacaaggttaaaccccgtctctactaaaaatacaacaatttgccaggagtggtggcacgtgcctgtaatcccagctacttgggaggctgaggcaggagaattgcttgaacccaggaggcagagtttgcagtgagtggagatagcaccactgcttgcccagatcaagagttaccaataccaagacataaaactgcacagagattggacctagagcagcaggaggtggtatataaatcacagatactagaggaaattgaaagagggagcagaaaaatgattcatctgtatcaggtgtggtcggcaagttgtaggatgtagaatgtagctggtggatataggaagagaattagaaaaaattaatgctcattcaagtttattttatgaactagccaaaatgtcacatatggatattcacagtaggtagaaagatcagagcagaagtagcacttttggcacatagttattgggattgagggagacttcattttagctgtaattttaaaatagatttggttacttttaattaatctttctaaagcttttaattttgaaaaagctttaatttttattgtggcaaaatatacatagcataacatttgccattttaaccattttaagtgcatagttcagtgtcactaaatacaatcacacgattgtacaaccgtcacactttccatcatctctagagctttttccttttcagtttcccaaactgaaactctgtaccctttaaacaatagcccttcattactctctcctcccagtacctgggaaccatcattctacttttggtttctatgaatatgacatgctcgatacctcatataagtggaatcatgcagtattagttttttgtatccagcttctttcacttagtcttatgtcaaggttcatccatgttgtagcatgcatcagaatgtccctttttaaggctaaataatattccactgtatgtctgtaccacattttgtttatccattcctctgtcaatgaatgcttccaccttttggctatcatgaatgatgttgctatacacatgaatttgcaaatatctgttgaagtccctgctttcaattcttatgggtttaaacccagaagtggacttgctgactcatacagtaattctatgttccatttttatttatttatttatttttgagacagagtctcactctatcgcccaggctggagttcagtggcatgatctcagctcactgacacctccgcctcccaggttcaagcgattctgctgcctcagcctcctgagtagctgggattacaggcacacagcaccacgcctggctaatttttgtatttttggtagagacggtgtttcaccatgttgttcaggctgatcttgaactcctgacctcgtgatctgcctgcctcagcatgctaaagtgctgggattgcaggcatgagccatgcgcccagcctatgttccattttttttttttttaatttaggaaccactgcactcttttccaccatgactataccgttgcagaatccactggaaaggcacaagggttctgatttggctacatcctcaccaacacttattttttcctgtttttttgatgattgacatcctaatgggtatgaagtggtatcttattgtggttttgatttgcatttccttagtaatcagtgatgttgagcatctttcatgtgcttgatggccagttgtatatcttctttgggaaaatgtctatgtaagtcctttgcctattttttagttaggttgtttattgttgagttgtaggaattctttatatattctggatatcgatcacttatcaaatatattatttgaaatattttcgtccattctgcaggttgtcctttgattgcacaaaagttttaaattttgatgaagtccaatttgcttatttttttcttttgttgcccacacttttggtgtcagacagcttttagtttacagttataaatatatcatgtctctcctgcctcatatgtaccactggacaaggtcccttttatgtgctcagattctgttagaggtaaatgtattttgaagtggagaacaaagataattgcaaaattggcatggagaactaaagtaattatgaaagttccagatacaaagagagtgggctcaatatgccagcagttctctaccaatccatcctagaagctttcttttaggattgcctaaataatgcaggggatgggtgcaagacacacaagtgttctagaagcatgtaaacaaggtacagagaagaggataagataaaataagatgagataagaatattaggaaagccttgttcagaagattgcctacagaggcaaaagggacagtttcactttgctgagggaaatagggtggtaagaaccctggtgaggaagaccctcgcttaccctgatacagagagaaggtgtaaaataacttaatgggagaccattaggctgcgatagttcccatggctgggttcctacatagacaaaatgaaacaagcttcacccatcacaagtggccagctgaatattagctgtgtaatgagtggccttccaccaggatagttcaaataatgcaactgcccaaattttcgccaatcaaataatttatctactctacttctacatccaccctataaaagccttccctgcaaatgcctccagtggatcctccaaccactttcagtttggggctgcctgatccatgaatctctgtttgctcaaataaactctttaaaattttaatatgctcaagtttatattttttttccattttaaaaattgagatgggatcttcctatgttgcccaggctagtcttgaactcctgagctcaggcaatctgcccatcttgccctcccaaaatgctgggattacaggcgttggccaccacgcctggccacaaaaagtctgcgtgtatggtagcttcaaaacccatttgtaaataggtgttttcataacaagatgaaaacaagaaaacattgaacttcatataatagaagggttctgcctggatttgcatgtgggccccatcatttgtttgctgttgggccatggtcaggttacttcctccacatagggtttaagcctgtgcatccttcatctacaaaatgggaatattaagaatatctaacaattagaagtggagaaaacatatgtaagggcctttgacaagagcttgtcaaagctcaataattgcccttaataattgttagctatcattcaataatcataatcataaaaatatatgactcaaagaaagattcctacttcatatctggcttctcaaaagaatatcagaaattggacctgtgaaaggaatgacactgagatgtattttcacattgctaagttggttttttctctttgccatttaatttctgcagtccccactctaagcccatggttcaccattttattcttcctcctaaaatttcttcccttctggtaagattatctttgccttaacaagggcccttttcatccacccactcccttacccttcccagaagtggttaatgggcacaaaaatacagttagatggaaagaaaagaacttctagtgttcaatagcacagtagcatgacgatcgttaacaataacttaccatgtatttcaaaatggttagaagaaagatttggaatgttcccaacacaaacaattgataaatgtttgaggttatggatatgcaaattatcctgatttgatcactacatattgtatgcatgtatcaaaatatcacatgtaccctagaaatatgtataattgtcatgtatcaataaaaacaaaaagggcctatttctctttgccttcctccccaaattccctcctgtcccagatatgtgttgttcctggtgctctcctgccccccgttcattcagcactgagccagcaggaaggatctcacaggtcatatcctgagatccagccctccaccccttcaggtaataatcctcctgcttttggtcattcgtatcctttggttcatagatattttgagtctagtgccttctaattgctgacctaaataataacccttggtttttaaagataatacaaagtggatttcagtaacaatcttgagtcttcacagaagctaatgaagtcagggattccatgaagccatccaagcatatagagctcatttccctgggtcccttttccttagctcaaggccacacaaaatcagaacatgaattccagcccacatttgcattatgtcgaaataattatgagttacaaatgaagctaacaaatagctaaatatgttctattcatctactttgataaatataccgccataataacccacaaggtcaaagttgagtgtagaattctcagattctttggtgctctgcacgagaatgtggtagcagaaggagagccaatcctcagccccaggccaaacttttccctttcatcgtaggtagccctgtcctcacttgagaagccttgcgtacccccgtgtgggggactccctaggccccatgcaagctccatccacatttctcaccccttcagacagcagagtcttgggcaccatttggacaagcagtttgcgctttgaaataaacccaggggagaggccatgcaggctcaggcacatttggccaggtgtctgagtgcccagagtatggcctagaagagaacgtgagagctctgggtgggccggggtacagtcagtggagggccagagaggcaccttctcaagcgcaggattcagggcaggggtcctcttgccgagatggatggctacgattgctcagtgcaatggcgcctgcgtcatgtcttctcagcgcatctttcactcagtctcagccaccatggggagttccatggaagcgcaggcttcccctgtgctgccagtaaactcaagctacactttctgccccagggcatctccattattttggagattataggattttggctgagcacaaacacacagcccagaaacacttgcaggttaacagcctcaggggaagatctcaaccagtgtgggacaggtgggcaaatgctccaggctcctgtttcaggtggacagttcgggaagactttccggagactctcagaaggttctggcagaaaagaagtccatggcagcagcctcaatagcatgcctcaatagcaggcctcaggtgatccgtccaccttggcctcccaaagtgctgggattacagacgtgagctatcatgcccagcaacataacatttatatgcacaggaaagcaaaaaatgtcgtgtgactagctctattgcgatattcgccttgttgtggtgacctagaaccaaacctgtaatatctccaaggtatgcctgtacccctaaaagaagagctggagtaaggacctgggtgtgggtggtttatttgggaagtgatcccaagaagcaagagtgagaagtggggagagtgagccaggtgagaaagaaaagccaaaatgatggcattgtttgaaccccggaggcagaggtttcagtgagccgagatcatgccactgcactccaacctgggtgacagagcgagactccgtctcaaaaaaaaaaaaagttgtgtttacactattgtagtcaattaagtatgcaatagcgttatgtttaaaatataatgtacataccttactttgaaaatacttgattgccaaaaaatgctaaccatcatctggtccttcatcaagtcgtaatcattttgctggtgcatggtcttgcttcagtgttgatggctactgacttattggggtggtggttgctgaaggctggagtgggtgtggcaattccttaaaataagatgacaatgtagtttgctgcattgattgactcttcctttcaccaaagatttcactgtagcatgctgtgcagcttgatagcatcttacccacggtagaatttttatcagaattggaatcagtcctctcaaaccctgctctatcaactaagtttatggaatattgtaagtcctttgttgttctttcaacaatgttgacagcatcttcaccaggagtagattccatctcaagaaaccacttctttgctcattcataataagcaactcctcatccattaagattgcagctatttggcagggcgcggtggctcaggcctgtaatcccagcactttgggaggccaaggcaggaggatgatctgagcttgggagttcgagaccagcctcacctacatggagaaaccccgtctctactaaaaatacaacacatggagaagccccgtctctactaaaaatacaacattagccggaatggcagtgcatgcctataataccagctcctcgggcgtctgaggcaggagaatcgcttgaacccaggaggcggaggttgcagtgagtcgagaacgcaccattgcactccagcctggacaacaacaatgaaactctgtctcaaaaaaaaaaagaaaagaaaagaaaaaagattgcagcaattcactcacatcttcaggctccacttgtaattctctttctcttgttatctccaccacaactgtggttacttcctctgctaaggtcttgaacccctcaaagtcatttatgagggttggaatcaacttcttccaaactcctattaatgctgctacttttacctcatctcaagaatcatgaatgttcttaatggcatctacaatagtgaatcctttccagaagttttccaatttactttgctgagatccatcaaaggaatcatgatctatggcagcaacaggcttataaaatatatttctcaaataataagacttgaaaatcaaaatgacacccaatccatgggatacagaatagatgttgtgttggcaggcatgaaaacagcattcatttccctgtacatctccgttagagctcttgggtgaccaggtatgttgtcaataagctgacgtatttgaaaggaatctttttttctgagcagtaggtctcaacagtgggattaaaatactcagcaacacatgcagtaaacagctgtgatatcatccaagtgttgttccacttatagagcatgggcaaagtagatttagtataattcttaagagatgccctaggatttatggaatcacaaatcagcactggcttttaacaagagagtcagcctgtcctttgaatgtttctttctttttttttttttttgtgagatacggtctcactctgttgcccagactggattgcagtggtgtgatcttgggcaactgcagacttgacctccttggctcaagtgatcctcccacctcagcctcctgagttgcttgtaccagaggcatgcaccacaatacatagctactttttgatttgtttttttgtttgtttgtttgttgttgttgtttgtagagacagggtttcaccatgttgcccaggctggtctcaaacttctaagctcaagcaattttcccacctcagcctcccagagtgctgggattacaggcatgagccaccgtggctggcccctttgaagctctgaagccaggcatggacttatcctctctatccaaagtcctggatggcattttcttccaatagaaggctgtttcatctacattgacaatccattgttcagtatagccaccttcatcaatgatcttagccagatcttctggataacttgctgcagcttctacaacagaacttgcagcttcatcttgcactattatatcatagagatggcttccttccttaaacatcgtgaaccaacctatgctaacttcagacttttcttctgtagcgtcctcatctctctcggccttcataaaatggaagataattagggccttgctatgtattaggctttggcttaagggaatgtcgtggttgacttggtcttctatccagaccacttaaactttctccataccagcaataaggctttgttttctttttttaatattatagaattggtttattgtaaaagcaattgaagaataccagttaaaatcttatcccaatgctacccaatagaaccaagaagcagttaagcaccttttacattaggaacaaggacataaaacaagataccacataaaggctatgattcaaactcaaaaagagaaaggactcttgggtctccttcaggtcaataaagaggttatcataagatcaaagcactgtgccaggtatcacagtactgttacaacactgaggtataactggacaaattaaagttgcagggaaatgaagatctccatactattgttttgtgggtgtacttaagtgattaaaattctagaaacagctgcctttaatgacaggaagatgtaagacaagtgtttattaaagagaaggaagcttataaagttctctctcaatgtcccccaaatcttcacagccccccaaacttcccaccctcctcctaagctaaaactactcagctttatgatgcagacttaatttatggcttactggaaaattataggcactccttccaagtagctttcatcttctgcacattaaaaaaaaatcccagccgggcatggtggctcacacctgtaatcccagtactttgggaggccgaggtgggagggtcacctgaggtcaggagttcaagaccagcctggccaacatggcgaaaccccatctctactaaaaataaaaaattagttaggcatagtggcacactcctggaaattctcctgaggcaggagaatcgcttgaatccaggaggcggaggttgcagtgagctgagatcatgccactgcactccagcctgggcgacggagtgaaacactatctcaaaaaaaaaaaaaaaaatcccaacaacatgttacataatttatatacccaattttgctttaatctttctgctgttttcgtaataaaagccttacagtcaattattatgagtgatcagcctataaacttatatataatacagtgattgcattttttgagcactggaagtacttaaaacttcttacttccaacttttgcactcctccgaaatgaagggccaaaatacttagattttgtaattgggaggaaaagcaatctgtcttctcaagatgatgcttttcatagcagcttttgccaggggaagcgattttatatctgtaataaatccttgaaaataagcgcttattctagaaacattggaagatccttaaaacatagaggtgctagctggtaccatttaaattcacaaccagctattactttatagcttatattgaagagttcattcatgctcattattttcctttaaaaaatataaaaaatactctttagaacccattattactcctgtagacacatacactttttacagcatttctttctgtaaaaatgaaggtataatcatgattatctctatttctttgctaaattcaactgtcaatatacatttattaacctgatcacttttccaggtaactcaagactttgtagtattctctccagcgtctattttcttttttcttttattttctgtttttctttttaatggagacgaagtctcgctctgttgcccaggctggagtgctgtggcgtgatcttggctcactgcaacttccgcctccccagttcaagcaattctctccctcagcttctggagtaactgggactacaggtgcccaccatcatgcctggctaatttttgtatttttaatagagacagggtttcaccatcttggccaggctggtcttgaactcctgaccttgtgatccacctgcctcagcctcccaaagtgctgggattacaggcgtgagccactgcgcctggccctccagggccaattttcagcatatagaagtaggagtaagacttacaagtaagaatcatcctgaaggcaattttttcatatagtctttaatgtgttcatcacaaatgagaacttgagaactacaaactagaatttatttccaaaactaaggcaaaggtaaacttccagaactaaatgtaagtaaaccactataaagcttatttctgtcatgcaccttatgaacctactcagtaatttccaaacaagactcaaattagtccaagggagtccaagggggaaaataaagccacttctggtttgctcttttccaattcatcagataatatctattgtgtgcccagagggcatggagtactcccctaggcactatccgtagtaattagggctttgtttttttattatgcatgtttttgctggagtagcacttttaatttcctttgagaactttttctttgcacttacaacttggctaactttggcacaagaagtatagctttcagcctaggttttcaacatggccttcctcattaagcctaatcgtttcttggtgttgagtgaaagtgaaagacatgtgtcttcctttaatttgaacactaagaggccatttgaggattattcattgacataattttaatatttttgagtctcaaggaagagagagagccaaggagagagagagagaaatggctggccaggggagcagtcagaacacatacaatttttatcaattaactttgccatcgtatagggacctgattcatggcctcccaaaatagttacaacagttacctcaaagaccacctatcacagatcaccataacagagtaatagtaatcgaaaagtttgaagtattgtaagaattaccaaaatgtgacagagtcacaaactgagcacatgatgatagaaacgtggcacagatagacgctccacacatggttgccaaaaccttcaatgtgtgaaaaacacagtatctgcaaagtgtaacaacatgagttatggcttcactcaaaagaataaagggacaaatcgaggaaatgaaaggaccagtccattccaagtacagcaatatcatcagcactatctcactggagtccttcaacaacaaaggcaaaaagtatcctcaacacatttatattataacctaaattcctgttaaacaggtttcggggatttttaaggggctggcccctttattctttcctctatgttaatttttaaattccttatttatttatttattttttttagatggagttttgctcttcttgcccaggcataatctcagctcattgcctcagccttccaagtagctgggactacaggccctgtcaccatgcccagctaattttgtatgtttagtagagacagggtttcaccatgttggtcagtctggtctagaactcctgacctcaggtgatccgctggcctcaacctcctgaagtgctgggattacaggcatgagccaccatgcctggcctctaaattgctcttatggagactcattttcatggttaaaatgtcctgaattgactgtggcttgttggtgggaggagggatggaggaagctacttatggaaaatgaacaaggaagggaagcacaccagaagctagaaagtgtcatcaatttttacatcaaagactccatgacaaagagaaagtacaagtagcctgtttttgtagctgaccattggactgcggactgcacatgcagctaccaggttcttctggatagtcccagttttaaatttttgacctgatattcatgaacatagtgctactggtcagacctttgtccaggtttaagcttcagaaaataaggtcttcatgcagtgggaggcctggttaggatcatgattctgccctggggcatctgccacttctgacctggagataaacttggcatctactatttacctccacattttaacagccaaggatgggctgagcacagtggcttacatcaggaactccagcaatttgggaggccaaggcaggaggatcacttgaggccaggagttcaagaccagcctgggcaacatagtgagacattatctttgtaaaaacaaacaaaaccgaggatcggtgggtggcagggagcagatcaacctgggcaaccattaatctgagagctggaaggacccttagaccagccccccagtaacagatgagactctgctctgggattatagcctaaggtaatgccctgagcttttctagagatttgaaaataattaatcctaaaacccccaagcacactgctactgtttgctatttaataatgttttccaggccgggtgcggtggctcatgcctgtaatcccaggactttggaaggctgaggtgagcggatcacctgaggtcaggagttcgagaccagcctggccaacatggtgaaaccccatctctactaaaaatacaaaagattagccgggcatggtgctgcttggaaggctgaggcagtgaggcagagtttgcaatgagccgagatcgcaccattgcactccagccaaactacaagagcaaaactccatctcaaaaaataataatgataataataatgttttctacaagcaaggggttactttgtactgtgaactggtgtgaagggatccaccatatgtaagcttttggagctgattttattatctgtgttgtcccaagtggtgaagggaagatggcacaccaaaatgggggcattggtgccagtgcatcaggtaaataggcatctaaagctctgagaatagactgctactatgcattataatcaatgctacaataaccttgtaggtttcttttcatgatactgcttgctaagttttttctgtttgcttcaccatattttgaacaattttctattaaattaggatattttaaaagtttgccttttcaatgtcttatttagataaattctgtagttccaaagttatatattttcaaagcctgatgcctttgatgtttgatgatgttaacaatatactattttcaaagccagtttgttatttctacactgatattgggaaaagaataaagtgatgaagtcaacaggtgttattaaaaatgtgaataacaggtaaacgttttgttatttgttttgttttgtctttgaagtatttcacagactagatttgaaggtttatgaaggatggggcaaaattatctaaggaaagttgcatcctatgacctcaggctgacttcaagtaagagtggatttgttaaaggcattgtctttcttggactatttgcatctttgtagaggagcctggagaggcagtatagaaggattgttttagatgttggatctctgtaacctccatttacgttttcttgagccattgtcatttggggaaaagcatgaaaaagaaaagatcattataatgctactgtaatgcacatcacatagaattgcaatgatttgttgattgttcattccaggccaagaacagtgagtttctccagccaaaggccttgtatttattgatctttctgtcccacaggcctaaaacagtggttggcccatggacagtttaataaatgtttgctgactaatatgtagcatatctaaaaccttttccatggccttgtctctggagattaagattttccagcatttgtacataaaagatgttgatgcataactgtaggtgaaaggcacttcttacatggcagtggcaagagaaaatgaggaggaagccaaggcagaaacccctgataaacccatcagatctcatgagacttattcactatcatgagaatagcacaggaaagactggcccccatgattcaactacctcaccctgggtccctcccacaacatatgggaattctgggagatagaattcaagctgagatttgggtggggacacagccaaaccatatcaccaaatatggagagactggatcaacaagatcatctcaaactaatacaggaggtgagagtttaaattagaacaaccactttggaaaacaataggattatcttataaagttgagcattctcatatgttatggcacagtaattcctctaccaaaggccctggagaaactcttgcccatgtgtacccgaagtagtaaaaaaagaaaataaatgctcatgtaatgccattcataatagcaaaaatctggaaataagccaaaagttcattaatactagaatgggtacattaataggagaatgggtaaataaattatacccttaaaaactgaataatatgttatttatggcaatcatatatatgcaataaaacaatttttttaaaggaatggaatcctaaatataaattcagggtagtagttaccgctggggctgaaaggtgtgaatcaggaaaaaaagacagaggaagagcagatgttaggatcagaacctagttcttgggttgtgtggtgggttcacaagtgattaccatgttgttcaaatacattcaaatacatttacatacaggccaaggcacaggcaaggatgaaataggagccaaggtatgctgtgagccaaggattatgattgatccaattttgtgcactttaagccatttgaaaaacagaaaagcaaaacaacaaaataatttttaagaaattgaatataaggtgctaatttttaagaaattgaatataggcaaggatgaaataggagccaaggtatgctatgagccaaggattatgatttatccaattttgtgcactttaggccatttgaaaaacagaaaagcaaaacaaaataatttttaagaaattgaatatagggtgctaacttttaagaaattgaatataggcaaggatgaaataggagccaatgtatgctatgagccaacgattatgatttatccaattttgtgcactttaagccatttgaaaaacagaaaagcaaaacaacaaaataatttttaagaaattgaatatagggtgctatggtctgaatgtgtctccctaaaactcatcaccaatgtcatagtattaggaagtagggcctttaggaagtaattcagtcatgaagggagagtcttcatcaatgggttacacaaagactggagggagtgggcttcccctgttttgcccttcctccttctgccatgtgaggacacagtgcatcccctcctgaagacacagtgcacaaggcattatcttagatgcagagaccaggccctcaccagacaccaatcctagtggcaccttgatcttggacttccagcctatggaactttgagaaatacatttctgttcttcataaattacacagtctagtgtattttgttatatagtagcacaaacgcactaaggcatagtgcctcgtcattttcttctagaattttctttgttgcctgtctagcagtgtgccattttatatttgatccttcgtaatatctcttacttttggatttttacatttctgttgcaagtgtattcttaggtacatgtttttcactatttgttagtgtccaggtcagaaagtccagaatacattctcttaagggttcagtttctgcagcaacgtaagtattaatgcctcctgtgaactaggtatttcctttccaattgtaactgccatctggaagcgaattggaattacagtctatgagtgtgggattgatttttaatgtatctgggttatggttaaatgctggtttttaatcacacagattcatcgatggcttggcacactagagcatcacttgctagttatctctatatttttccatgctgttagagagggaaagtacagactgtgaagttggaccagctgtcatacacacaacatttggggagctttgatttttttaaaacctttagctgcttaactgtcacatgtagcagctcaggtgaaaggcacttttattgtggggactttcccttagtgctctgtggtgcaagagcagacctatgtagaagcatttaagtattttgtgcatcaacaggacaattataggaaaaaattttttaaatataattttatttcattttctgcattacttagaagcatcagtaggatgaaaacaatatttgtttcttaaacctgtgcacaaattaattgatgtgacacacattaattcatgattattttcttaatgaattgattctaaagcttctctaagataggaaggcataagacaaccaaaaagaaatattgatttataactgttctaatactgctcagcatttttaaagtacactatagccagaaagcatgttataattactaataagataatccacagaatgccttgctgagccaggtaggtgtagaagaaataaattgtttcatattggaggaaagtgaacactataaatcaatatactagtgtgaaattttgcatggctacatgctatcatcaccagcatcacaaatgacttaaggaattcctcagatgagagtggactcctattggtggccacaatgtcacactctttttttaattttttaatttttatttaaaaattttttttaatatactttaagttttaggatacatgtgcacaacgtgcaggttagttacatatgtatacatgtgccatgttggtgtgctgcacccattaacttgtcatttaacattaggtatatctcctaatgctatccctcccccctcccccaccccacaacaggccccagtgtgtgatgttccccttcctgtgtccatgtgttctcattgttcaattcccacctatgaatgagaacatgtggtgtttggttttttgtccttctgatagtttgctgagaatgatagtttccagcttcatccatgtccctacaaaggacatgaactcatcattttttatggctgcatagtattccatggtgtatatgtgccacattttcttaatccagtctatcattgttggacatttgggttggttccaaatctttgctattgtgaatagtgctgcaataaacatacgtgtgcatgtgtctttatagcagcatgatttctaatgctttgggtatatacccagtaatgggattgctgggtcaaatggtatttctagttctagatccctgaggaagcaccacactgacttcacaatggttgaactagtttacagtcccaccaacagtgtaaaagtgttcctatttctccacatcctctccagcacctgttgtttcctgacttattaatgaccgccattctaactggtgtgagattgtatctcattgtggttttgatttgcatttctctgatggccagtgatgatgagcattttttcatgtgtcttttggctgcataaatgtcttcttttgagaagtgtctgttcatatccttcacctactttttgatgaggttgtttgtttttttcttgtaaatttgtttgagttcattgtagattctggatattagccctttgtcagatgagcaggttgcgaaaattttctcccattctgtaggttgcctgttcactctgatggtagtttcttttgctgtgcagaagctccttagtttaattaggtcccatttgtcaattttggcttttgttgccattgcttttggtgttttaacatgaagtccttgcccatgcctatgtcctgaatggtattgcctacattttcttctagggtttttatggttttaggtctaacatttaagtcttcaatccatcttgaattaatttttgtataaggtgcaaggaagggatccagtttcagctttctacatatggctagccagttttcccagcaccatttattaaatagggaatcctttccccatttcttgtttttgtcaggtttgtcaaagatcagatggttgtagatatgcggcattatttctgagggctcttttctgttccattggtctatatctctgttttggtaccagtaccatgctgttttggttactgtagccttgtaatatagtttgaggtcaggtagcatgatgcctccagctttgttcttttggcttaggattgacttggcaatgcgggctcttttttggttccatatgaactttaaagtagttttttccaattctgtgaaaaaagtcattggtggcttgatggggatggcattgaatctataaattaccttgggcagtatggccattttcatgatattgattcttccaacccatgagcatgtaatgttcttccatttgtttgtatcctcttttatttcattgagcagtggtttgtagttctccttgaagaggtccttcatgtcccttgtaagttggatccctagatattttattctctttgaaggaattgtgaatgggagttcactcatgatttggctctgtttgtctgttattggtatataagaatgcttgtgatttttgcacattgattttttatcctgagactttgctgtagttgcttatcagcttaaggagattttgggctgagacaatggggttttctagatacacagtcatgtcatctgcaaacagggacaatttgatttcctcttttcctaattgaataccctttacttcctactcctacctgattgccctggctagaacttccaacaccatgttgaataggagtggtgagagagggcatccctgtcttgtgccagctttcaaaggaatgcttccagtttttgtccattcagtatgatattggctgtgggttgtgggtttgtcatagatagctcttattattttgagatatgtccaatcaatacctaatttattgagagtttttagcatgaagggctgttgaattttgtcaaaggccttttctgcatctattgagataatcatatggtttttgtcattggttctgtttatatgctggattacatttattgatttgcatatgttgaaccagccttgcatgccagggatgaagcccacttgatcatggtggataagctttttgatgtgctgctggatttggtttgccagtatttcattgaggatttttgcatcgatgttcatcaggaatattggtctaaaattctcttttttgttgtgtctctgccaggctttggtatcaggatgatgctggcctcataaaatgagttagggaggattccctctttttctatttattggaatagtttcagaaggaatggtaccagctcctccttgtacctctggtagaatttggctgtgaatccatctggtcctggactttttttggttgttaagctattaattattgcctcaatttcagatcctgttattggtctattcagagattcaacgtcttcctggtttagtcttgggagggcgtatgtgttgaggaatttatccgtttcttctagattttcagtttatttgcttagaggtgcttatagtattctctgatggtagtttgtatttctgtgggatcggtggtgacatcccctttatcattttttattgcatctatttgattcttctctcttttcttctttattagtcttgctagcagtctatcaattttgttgatcttttcaaaaaaccagctactgaattcattgattttttgaagggttttttgtgtctctatttccttcagttctgctctgatcttaggtgtttcttgccttctgctagcttttgaatgtgtttgctcttgcttctctagttcttttaattgtgatgttagggtgtcagttttggatctttcctgctttctcttgtgggcatttagtgctataaatttccctccacacactgctttgaatgtgtcccagagattctgatatgttgtgtttttgttctcattggtttcaaagaacatgttgacagtggggtgttaaagtctcccattattattgtgtgggagtctaagtctctttctagctctctaaggacttgctttatgaatctgggtgctcctgtattggatgcatatatatttaggatagttagctcttcttgttgaattgatccctttaccattatgtaatggccttctttgtctcttttgatctttgttggtttaaagtctgttttatcagagactaggattgcaacccctgccttttttgttttccatttgcttggtagatcttcctccatccctttattttgagcctatgtgtgtctctgcacgtgagatgggtttcctgaatacagcacactgatgggtcttgactctttatccaatttgccagtctgtgtcttttaattggagcatttagcccatttacatttaaggttaatattgttatgggtgaatttgatcctgtcattatgatgttagctggttattttgctcgttagttgatgcagtctcttcctagcctcaatggtctttacaatttggcatgtttttgcagtggctggtaccggttgctcctttccatatttagtgcttccttcacgagctcttttagggcaggcctgctggtgacaaaatctctcagcatttgcttgtctgtaaaggattttatttctccttctcttatgaagtttagtttggctggatatgaaattctgggttggaaattcttttctttaagaatgttgaatattggcccccactctcttctggcttgtagagtttctgccaagagatcagctgttagtctgatgggcttccctttgtgggtatcccgacctttctctctggctgcccttaacattttttccttcatttcaactttggtgaatctgacaattatgtgtcttggagttgctgttctcgaggagtatctttgtggtgttccctgtatttcctgaatttgaatgttggcctgccttgctagattggggaagttcccctggataataccctgcagagtgttttccagcttggttctattctccctgtcactttcaggtacaccaataagacgtagatttggtcttttcaaatagtcccatatttcttggaggctttgttcatttctttttattcctttttctttaaacttctcttctcacttgatttcattcatttgatcttccatcagtgataccctttcttccagttgatcaaatcggctactgaggcttgtgcattcatcacatagttttcgtgccttggcttttggctccatcaggtcctttaaggacttctctgcattggttattctagttatccattagtctaatttttttcaacgtttttaacctctttgccatgggttcaaacttcctcctttagctcagagtagtttgatcatctgaagccttcttctctcaactcgtcaaagtcattttccatccagctttgttccgttgctggtgaggaactgcgttccttggaggaggagaggcactctgatttttagagtttccagtttttctgctctgttttttccccatctttgtggttttatctacctttggtctttgatgatggtgacataccgatggggttttggtgtggatgtcctttctgtttgttagttttccttctaacagtcaggaccctcagctgcaggtctgttggactttgctggaggtccactccagaccctgtttgcctgggtatcagcagtggaggctgccgaacagcggatattggtgagcagcagatgttgctgcctgatcgttcctctgaaagttttgtctcagaggagtacctggccgtgtgaggtgtcagtctgcccctactggggagtgcctcccagttaggcttctcgggggtcagggacccacttgaggaggcaatctgtccattctcagatctccagctgcgtgctgggagaaccactactctcttcaaagctgtcagacacggacatttaagtctgcagaggattctgctgccttttgtttggctattccctgcgtccagaggtgaagtctacagaggcagcaggcctccctgagctgcggtgggctccacccagttggagcttcccagccgctttgttcacctactgacgccttggcaatggctggcgcccctcccccagcctcgccgcccccttgcagtttgatctcagactgccgtgctagcaatgagcaaggctccatgggcataggaccctctgagccaggcatgggatataatctcctggtgtgccatttgctaaggccgttggaaaagctcagtattagggtggagtgatctgattttccaggtgccgtctgtcacccttttctttgactaggaaagggaattccctgaccccttgcgcttcctgggtgaggtgatgccttgccctgcttcagctcatgctgggtgtgctgcacctactgtcctgcacccactttctgacattccccagtgagatgagcctggtatctcagttggaaatgcagaaatcacccgtcttctgcatcactcatgctgggagctctagactggagctgttcctattcagccatcttggctccaccgaacaaatttttattgtatcttttagtctatgaagacaaaaccacagtgacagtaactaggtcaaggcattgtattcagagagcgtcagccttggtctttgagagtgagtcctttttaccacactgttaagactcactgagcagatgggaaatttcaggtggaacatgcagtgaatagcaaacacggtggagggtgctcactgtcatgcgctgccatgcctgccatggtcaacagacctgtcttgtccttgacaacaggcaggttgataaacattttcttggagagtttcttgattcttctcagttgtagcaggatggactgacttagaggagctcaggaagattgttatacaacacagaaacacaagatgaattgtactcctcagcaagcctaagttagagcagcaggtccttgaagcctcagccactcctgggacatagcataatgcccctaatgatttgaaatttagtggagagtgggttgctactccctgtgtccaggaacaaaaagagacataaagagcaaaaagttataaaataagtgggactaatatctgcttattttgggaggtagggatttaagatacaagaattcagctgcatgtggaagcttacatctgtaatcttagcacttggggaggccaaggcaggaggatggcttgagtccaggagttggagatgagcgaggcaacatagtaagtccccattcatacaaaaatgtttctgaagaaaagtagttcagtgaggtggcacatgcctgtagtcccagctatgtgggaggctgaggcaaaaaaatcgcttaatcctgggagattgaggctgcagtgagttatgatcacaccaatgcactgcagcctgagagtcctgaaaccccagccggcgacctgaagctcctcctccaccggtaaaagtcggctcaaaaaggccctgaggacaggggtcctgggggtccggccccgaagtcccctctccaacaacgcccgctactccatcaacactccagccaccacagcgactgccacaggagcccccgtccacgcagagccgaaaccgtttaaaggggctacagcctgacttccaagggcaaagcacgagtcggcttaggcaatgcggatgcatgaggcgacaccgctactcctgtcacagtgaccccaatggttgcctgaggacgactccatcaaccttgacaaagcaggagccgtccgtggcagtgcgtcagtgttgaggcgccaggctgacatctccagaaggtcaacaaaactgtttcaggattccaggagacacggaggggcaaacaggatgaagaaacagcaggcggagtctgggaaaagcagcgcggaattccagcccgaggcctgcccggatggtgtttgggtgagtctccccaaaagtcgtgccccacatcatctcgaggaagcgtctgcctgtgtgcccgtggactactctctaaaccgatggttgttcttttgaaaagcagaaccccgcagcctcaggggttgcctggggtggtgtgtttccgttccactgctgtgtatctgtgagtgtgtctcccattctctcttctctctctgtctctcactctctgtctctctctctctctctctttctctttctgtgtggcagggagccgaagggacgggactggggctgggtacaggggaggctgtgtcagggctacctaggcgttggaggggtggggatggggtgaactttgcagaaacctcttcgctcctctgacaggcatcccaaaatgtggcttggactcacacacaggttctctcctggttcccaggtgggctatgcttttatgtggcgttgacagggaggtcacctgtgccccccttccaccaggcacatgcctggacacctttcttcatcttggcatagccccatatgggctcggtgacacacactcaccccatcttctcttggggacgccagtgacacgtgtggttgcattggctccaccttggactcgcccctgtccctgtttgcacttgtcctggaaagcggtgtcttctcgcaggagccccagggctttgggaagcaggacaggccactggtcctccaagggaggagggaggcagagggctcatgggtcagtgaattttcagctgacaccacgccttgaggcccatgggatctttctgtgccccagtgaggcccttcccacctcaacagataaggtgaacccatccctgctcacctggtgggattcaaaatcagatctgaggaggaatccaaagacccgagcaggcgccctgaagctcctcctccaccggtaggagttggctcaaggaggtcctgaggacaggactccgggagtgcggccctggggtgcctacagccctctctcccacgtcgccgcctaccggaccggggatccagccaccgccagggttgcagccaaaggcccctgcctctgcgctgccgccattgcttaaaggggcttcagcctgacttccagcagcggagcgcgagtcggcctagccaatgcgcatgcgcgaagcgccagccaattctcccatcacagtgagtcccacggttgcctgagtaaccactccctgaggcttggcaaagcaggagccctccatggcagtgcttgggtgtcggggctttgaggctctggcctgacctctccacgggggcgacaggaaggtctccggatgccaggagtctccaaggactgaccagggtgacaaaaccacaggcagagtccaggggaagcagtgcggcatccaagcctcaggcctgcccggacggggatcgggtgagcctccccaaaacttgtgcaggccatgatcttgaggacaggtctgcctgtgtgtccataggctcctgtctcatcccagtgtcgatctcgtggagagcagaaccccaaagcctcaggggttgcctggggctgtgtgtttctgtgccactgctgtatgtctgtgtgtgtgtctcccattctctcttatctctctgtctctcactctctgtctgtttctctctctctctttctctgtgtgtgtgtgtgccagtgtgggtgtgtgtgttgggatcaatgtgccctgtgcgccaaaaagcgatttcttgcatgtcaacctgtttttggtgagccttttttttggtctctgcctgggtcatgtggccggttgtcaatcgttttcgtggtggttccactttgggattgtgaaggcctcgaccacatgaggagatgcgtcggtcccggagcaactggaatctcatccccatcctgagcggcttttctagaatcaagatgaccacacttcagccaaggaccaaagcctcataggagctcattctcctgcaggaggggagcagaccgatgtcaaaggagatggttgtatctcctcgcggcttttctctgagaaatgaagccacaccacgatacagtcttaaagaggaagccaggaaccggagatgacaacaatacctgctgtcactggaatgctggcctctctggacaagtcacccatttgacactccttcccttaaccctgtcggtgacactgtgctgtgtcttgcctgggatctggcctctgctctgtcctccctcttgctctgtctctcctgtttctgaggggcctagatgcttcttggtctggctcaatgtcttcaacaaagaacacttcccagtccatcagggagaaaattcgtggagatccgtgtcataattgtttctctctccaaacctgtttctggttgattcggccggtttgactatcctggaactctgggcttccatacctgtttcagacagggaagctcccttggtctccaagtttcacctcatggctgggtggattgcctagaatgagcggtaggcgatcatggctggccttggcgtctaggaaaggccgtgcggcatttcctctgcacttcctgtcttattattgagagacatcctcccctctgcttctggatggactgcctcccagaactgaatctttcagctctcacaaatgtcagggatccaaagggcaagggctggggctgggtgcaggggaggttgcctcagggctacctaggctgtggaggggtgagggtggggtgaactatgcagaaacctctccgctcctagagcaggcatcccaaaatctggcttggattcaggcacgggcccattcctggttctcagaggcgctatgcttttccttggcgttgactgggaggtcatctgtgtccccccgcatccaccgggcacatgcccagacaccattgttcgtctcgcaatcaccccatatggcctcggtaatgcacactcacccaatctgctcttagggaagccagtgccacgtgtggtctcattggctctacctcggactcgccctatccctgtttccacgtctcctggaaagtggtgttggcttgcagcagccccacggctttgcgaatcggggcagcccacagctcctccaagggagaagggaggcagagggctcgtgggtcagcgaattttcagctgataccacgccttgaggcccaagagatcatcctgtgctgcagcgaggccctgcctgcctcaccacatgcctcccgcctgagcccatccctgctcacccagtgggatccaaaatcggatctgaagaggagtcctgagagcccagcaggcgccctgaagctccccctccaccggtggaagtcgactcaaggaggccctgaagacaggactcctgggggtttggccctgggacgcccgcggccccctctcccacgccgccctctactggaccccggatccagccgccgccgcggctgcagcaggagcttccctgccttagcgcagccgcgccgccgccattgtttcaaggggccgcagcctgacttctaggagcggagcgcgagtcaaccccgccaatgcgcatgcgcgaggcgcgagcggattctcaccgttgtcttagaaaccagtccctgaggcttggcaaagcaggagccctccgtggcagtgcttggctgtcggggctccgaggctccggcctgacctctccacggggtcgacaggaacgtctccggatgccacgagtcgcacagagctgtcgaggatgacgaaaccacaggcggagtctgggggaagcggcgcggcatcccaggctcaggcctgcccggacgtgttagggtgagtctccgcaaaagtcgtgcccgccgtgatctcgaggacaggtctgcctgtgtgctcgtgggccgccctctcacctgagggtcgttcttgcggagagcagaaccccgcagcctcaggggttgcctggcatttctgtttctatgccactgctctgtctctgtctctttctctctctctctctctcactctatctctgtgtgtgtgtgcgtatgtgtatgtgtgtctgtctgtgtcccattctcttttctctgtctctcacttcctgtttctctctctccctctgtctgtatgtgtgtgtgcccatgagcgtgtgtgtgttgggacgtatatgccccctgcgccaaaaagggatttcttgtatgtccgcctgtcgttggcgagcctttttctgcgtctgcctgggtcacgtggctggttgtctcgttttcgcggcggttgcacttcgggtttttgaaggcctccaccacctcaggagatgcgtcggtcccagagcaactgaagtctcatccccatcctgagtggtctattctctagaatcaagatgaccacactccaggtaaggacaaaagcctcccaggagctcattgtcctaaaggagggaagtagaccgacctcaaaggagatggttgtatctcctcgcgtctcttctctgagaaacgaagccacaccacgatacaatcttaaagaagaagctgggatggggacacggcaaggatccctgtcactggaatgctggcctctttggacaagtcacccgtttggcactcctcccctcagcccgtggcggtggcactgtgctgtatcctgcctgggctctggcctctgctctggcctccctcttgctctgtctcttctgtttctgaggggcctagatgcttcttggtctggctgaatgtcttcaacaaagatcacttcccagtccatcagggagaaacttcatggagatccatgttctgattgtttctctctccaaacctgtttctgcttgattgggtaggtttgatgatcctggagctcttggctcccatacgtgtctcagacagggaagctaccttggtctccacgtttcacctcatgtgtgggggggattgcctagaatgagcggtaggcgaccgtgactggccttgtcttctaggacaggcgctgtcgcattttctctgcacttcctgtctcattcttgagggacatcctctcctccgctccggggtggactgcctccctgaatcttttggctgtaatgaatgtcagggaaccaacgggactgggctggggctgggtgcaggggaggttgcgtcagggctacctgggcggtggagggttgagggtggggtgaactttgcaggaacctctttgctcctccagcaggcatttcaaattgtggcttggactcacgcacaggccccctcctggttcccaggtgttctatgattttcgttggcatcgatggaaaggtcacctgtgccccccttcctccggaacatgcctggacaccattgtttgtttcgccatcgccccgtatgccctctgtgacacacattcacagcatctgctcttgaatacaccagtgccacgtgtggtcacactggctctactttggatttgcccctttccctgtttgcacgtgtcctgcacttttaccagaaggtggtaaaagtaagagaagaataaaattttggacatgtaaaattcatgtcttctatagagtaactgggtaaagatatccatcagactgttatatatgctcttcaggagctcaagtagggattgtattgcaaatgagtaatttgatatttatcagtgtacaatgatgactgaaaccattatagccattgcagtgtggtgtgataattcactgatgctatgcggaacaggatatcaagcaggttttggggacaagtaccagttaagaaacaagcaaagaaaagaattcataagtggaaaattgtttttaagtgataattataattagcatcatgagaaaacaatatgatgaagccaaggaaaatatttaagatgtctttttataaaagagccatgatgagcagattttaactttgcctctcataaaaccaattaaaaaaacttaattttcaaaggaatgtaaaaataagggaaaatatcttaatttgggatagaaataagaaattgaggcatccacatatcccatattttgaggactttcttacagaaacaatacacgtaagatgagacggaaatcaccaagacttgggtcatgagtttctgaggaagaaatgaggcaaacgttaattcaacgtttaatggtgacaatcattgctctgagcaacttaacaactctttaattctcaaaaaactttcatctatgtgtttagcctcacttttaggtcataaaactgaggaactgacaatttcagtaactataatttgcgcatgtcacacagaaagtagtggaatgagaattgaaatctacatcttataacctctaaaatatttgcttttaacctctacactgttagaagtaactaactggacacatggacagaatagttgtgtgtttgttttctcctcagatgtggagaatcatgtaagtaaaggaatgaggcagtaaagaaagaactgtgtaatatatttaagtgtaagtattaactagtggggaagggttctagaagtcataggaaagatgggatgaaaaacagaaaagacattatatttaagaggaggaacatctcattttttgagaccagagtaaagaagatatggagagggctgtggaccacaagtttaaaactttgccaaagtattttacttcgtgtccatgaaaatcttttattttcctctgagaaattaataggcttttttatgaaagacagtgcaaactatataatgaattttgttaattttagttttatgtcctaatttgtttttcctatgaaggccagattcaaatttgaagcttaattcttaatgaacttatttctgtatatttctaattgaaagtttctccttaatcacttatgttttcctaattttgatccacttagggttttccatcttttgttgagattattgttatctacttttcctgccttatagaataagataataaaataaatacatcatttaaaactcacgtaggacttcatcatttcttcttcctgggagacagcagaatcctgagatggccaaggtaggggatgggtgaaaaaataagccatcaaaaaccccacttgcttagcagctctaggaaaggcagactaggaatctccagttagttaagatcatctggaggaactttgtggggaaataatcttaaagtctatcaaaaagccaagaataactacactgtttgcaggcaccaatatgtacaagcatgactgacgaaatcctatggagcttcaatatggatttttaaacattatttctaaattaaaagtataattcagaagatatttttaagctagctgcatacttcactcttcgatctatccatccatccatccatccaatcacaaacttacagaaagttgcaagtatagcaccaggaactttcttgttactgaaccatttgaaagtaaattgttgacctaatgctacatcacccctgaaacaggaattaaaagaaattaaagagtgtgtaagcaaaaactcaattgtatgtgagaaaacccaattccccctgagaaacagaaagagctggagtcctttaaaaaattaactgcctgtttttctgtggctagtgagctttatctctccctttcccaggcattgtgaagacccggtttccctagctgtgcagctgcaaggtcactagacagataaactcaagtcgcaaaacatgtttttccttgaaaagtaagaaatgatgtaatgcatgtctcacttgcataagtgcctttgtttctcgcttctgtagtatgcttccccctgcatagatctcccccctcccccgcctacccccacccgacgaaatgcctaaaaggtaatttaactctttgttcagggctcagtcctttagatgttaatccgactgtgcagttaaataattaataaatatcatatcctcctgaaccccatcagtcgctctaattccttaaagatcccacaacatccctcaaaatgctgcatatttcctacaaaaaggacatgcccctacctacataaccacaatccaattaccaaaataaagaaattaacatttatttgttatgaccatcgatatcagattcaagtgttgccaattgtgccattaactggatagcatgaaaggaacaaatttagaatcatgcattgcctttagatgtcatgtctctttaatctcctttagtctgatacagtttctcagtcttgcccttttataaccttgacactttttattattataagccagtctgaagaatttccttccaatttggttttctctgatgtttcctcatgataaggttccgagttgtagaaagaatgccacaaaagtgatgcatgctcctatcaggggcacatgatgacattctatcctattactggtaatactccttgatgaaagagcattacatcttaatcactaagatataccagccaggcttctctactgtaaaattactctttttttcctttgtaattagtaaagattttatggggaggtactctgagactatgtaaacacaccattcttcatcaaactttcaatttattaatttatgtcagtatagacttgtgatttcctatttcattcagaggtttgtaatctattattacttattttaatgaccagtttgctccagatttggcaagtgggagcccctcctgtgtgggttttgcggcctttaacaggttcctatcattctttgagcgccccttacttacacatataaaagatgttccaggctcatcttgtatttgctgtgcccaacactggaatcaatcatttcttcaaagaacgcagatttttatcagaggaaataataatagtagtaaaatatatattttatgtgtgtatttatgtatatgaaacatatttgatcagtcccccctagaagaagccactatcccattactgccgccatactctccctggatagatacctcctcattgtgctcaagctacagtgcagtgctttaggcctaagtaactgcaccggcatgtatgcctagcttgctcagcccctaatggatttaggattacagtattaggaagagaagggaaaatgaagaatctttcctgttggggtgatcagacccaacaccaggtcgtgggggtgacaaagtccggcggagtcaaaggattgagaaaaagacagtttgagagagaaaagtgggaccggacccagggggccatcacaatcgtagaggctgcgaaggcccgagctctgggagcccatgctatttattggtaatccaacaaagaaacaggtggtgagaatgtggaggtcaaaagggcacattgcattaagtacatgatttacagctgtgatggtttagcatttgctctacttgagataatggagagcagattcttttaactcaagatacaatcaatcctgggagagcaaggagcaaggagccagcaagtctagatacattccagagccatgagccctggattctatccaagccacaagggattttatgccctgggcttagattatggtgcatgatggtaggcttccaccctttagcatagagcttggtgttccaaaggccacaaggggttttagaccctggaccccggacatgttccaagactcttttacattatgtcagacatgcaagccctgcctcagcttctcctaaccctcagctttttcccaacactttcccagctggatcagagagatgcaatgtttgaaggacttgaccctctattgctggcttttgagatggaggaagggggccgtgagccaaggaatgtggcagcctcttgaagctgggaatggcccttggcttacagccagcaagcaaatggagacattggacttacagatgcaagaaactgaattctgcctattaacctaaatgagtaggaagcagattctccctagagcctctagaaaataatgcagcattgctgccactttaaatttagttcagtgaggtctgaacttcttgacctacagaactaaaagctaataaatttgtgttgttttaagtcactaaatttgtggtaatttgatacaagaaaatactcgtacagtggtcacttaattttcaataaaggtgccaaagacctccactgttgaaaataccatttgcattttcaataaatggcactagaacaacttgatatccatacagaaaaagaaataaatgaacttcaacccctacctgccaccatgaacaaaaattaacataaatcctagaactaatataaaaagctacaactctaaggcttctagaaagaataaatatgtaaacatatttccaacctggcagtagacaatttgttaagtcacagaaagcaaaactgcaaaagaaaaagaattgacaaatgttatcaaaaatgtttttcttactcatcaaaagacactgttaaaaatatgactaagaacatttataactcggccaggcgcggcggctcacgcctgtaatcccagcactttgggaggctgcggcgggtggatcacctaaggtcaggagttcgagaccagcctgaccaatatggtgaaaccccgtctctactaaaaatacaaaaattagctgggcatagtggcatgcgcctgtagtcccagctactcaggaggctgagacaggataattgctttaacccgggaggcagaggttgcagtgagccgagattgcactccagcctgggtgacagagcaagagtctgtctcaaaaaaaaaaagaacttctataactcaacaataaaaagatgaacaaaccaattaaagatgggcaaaaattttgaccagatacttcacaaagaaagatgttttgccaataagtacataaaaagtgatcaacatcattagtcattagaaaaatgtaaattaaaaatactgtgggacagtaatgagatatatagccagaaagacagcaccaaatgttggcaaagaggtagggagactgaaactctcatactttgttaatgggagtgtaaaatggtgcaatccctttgggtatggtttgacagtttcttataaaactgaacatacacctatacactgtgtctgaacaattccattcctaggtgttaccccagagaaatgaaaacagatgttcataaacagacatgtccaagaatgtttatgacactattattcataatagccaaaaacttggaaatagcacaaaagttcaacaagaatatgaataaactgtgatacaatcatagagtggaatacaactcagcaataagaactattgagtataccacaaacacccacacatacaacatggatacatttttaaaacattatactgagtgaaagaagccttacatacaaaaaacacatatttcaatcccaattatacgaagttctagaagagacaaaaattaatctacaatgggaaaatatcagaatggcagttgtttctggatatagagtgggaaatgactaggaaggagcatgaaggaactttctagggtgatggtatttttcttcactttgacaggattttggtttgcacaagtatttgaatctgtcaaaattcttcaaatggtaaatttaagattacacaattttactgtatgtacattttacctaaaaagctgtaactagatattgaactttagttagtggtatgcatgctaaagtatttaggggtaaagtatacgatgtctacaactaactttgaaatacaacaaaaaatggatcaattcatccttatggatgaatacagggctggatacaaggctaattatttggtaaagcaaatacagcatgatattcattatagtacttagatagcgaatgtatgggtatttttgtacaattcttttaatttctacatgtttggaaattttcataaaatggtgaaaatacaaaactatcaacttataattctacattcagcaaaaatatctttcaagaattagaagtttttagacaaataaagacagaagttttcaacaatagatcctcactgaagaaaactgtgatagatgcacttcaggtagaagaaaagtgatgcaagaaggagaggtaagcaaagaaagcagtaaactggtgtgtaatcaaacactcagctcataaaacataataatgtctccatatgtgtgtgtacattattttggtgcttatgtttacaatataatttagcaggatatacttaagttatcaaagtctaaatagtatttttatttcctgccaatgacattggcatacttcaacactaatcacttctaccaacttaaaagctattgctgtggtatttttaaaatatatattagtgtgtgtgtgtatatatatatatacacttacacacacacatacatatagatatataaccagattataccacaaagatagcatgtaggttggtagaaacaatgcttggtgctaaagtattctaacatcattattttgctgggcaggaaaaatgttttgttcacacattgataacttaagtatgtcctgttaaatattttgcaaaagtactaaaataatataaatagaatgcatattaccccaaagagtagcagaaaaggttggggagggggaaccaaactgaagaaagaataaaggaaagaaatgaaacattaaagttacatatacatcacatcacaaaataaaatcatagaaataaatacaaatggccgggcgcggtggctcatgcctgtaatcccagcactttgggaggctgaggcgggcggatcacctgaggtcagcagttcaagaccagcctgaccaacatggagaaaccctgtctctactaaaaatacaaaaattagctaggcgtgatggtggactcctgtaatcccagctactcgggaggctgaggcaggagaattgcttgaacccaggaggcagaggttgtggtgagccaagattgtgccattgcactccagcctgggcaacaagagtgaaactctgtctcaaaataaataaataaataaataaataaaaatatgccagtacatctctgattggataaataagtaaaatgtaactaaaatctgttttcaagaagtatattaagggaagcatatagaaagactgaaaatgaagaacagaaaaaacatttggaaaatactaatcaaatgaaagctagtgttgtgatattagtgtcagataaaacagactagagcattattataaagtgatcactaactgcatcatgatgaaatgttcaattttccatgaagatataaaaattgcaagcttaagttactaaaaatacacactataaaccaaaaattaatgaaactacaaggaaaaataaccttacagatatggcgagatattatacatagttcttttagtaaatgatagataaaagagatacaatcagtaagattatagatttcaacaaaaattacaactttatttaatggctatgtatttttaaaacagttactattatacacaatagctgcaaaagacaaattctcatcaaagacacactgaatatttagaaaacttagacacgtattagcctatcgggcaaatctcgaaaactttcaaaggactagttttatataccgtactttcactgcccacaaaagtagctatgtttgatatatgtcatcaaaggaaaattagaaagacctatatagttaagaaatataattctaaattatttatggttaaaagaaatcatagtagaaatttaaaagtatttaaaactgaatgatgagattactacttaatatactgatgctcctggactcaatggggttatgccctaataaacccatcacaagttgaaaatatcattaagtcaaaaatgcttttacctaacctaccaagcatgacagcttagcataacctactttaaacatgatcagaacacttatattacctaccagttagatgaaatcatctaacacaaaccctattttataattaagtgctgaatgtcttaatttattgaatactgaactaaaagtgaaaaacagtattgtcgtatggatatttgaaatacgtttctactgaatccatatggcttttacaccatcataaagttaaaaaaatcatagaaccattgtaagttggagactgactgtatataaaattctgtaggatgcagctaaagttggacctcgaggaaaagttataaccttaccagtttatattagaagtgtaaaaattgataatatctagcatccagcttaaaaatgtgagaaaacaatggcagaataaatccaaggaaagtgaaagcaaggaaataataaagaccaaaacaatacaagaaatagaaaaatagttatattatggagaggattaataaagtctcaaatagatttttgtgttatatcccaaaaattattataaaactgctacagcatggaaatagcacagggaacaaattgaccaatataattgaataatgaattcccaacatatgtgacacatacatatgtgttgtatgtcccatacacatataataatccaatttatgactactgataagtgaaaaagttggtctttgcatattctgggacaactggtatatgcacacatacataacacagaaattgtatctctcctttaacttactacagagatgaattctaagagattttataaaaaaaattgtgaaaggcaaaactataaacctttaagaagataatatatgaagctaaatttatgactttgatatagagaaggatttcttaaaatgcaagaaagtacaagccatagagaaaaaaattcataaatctgacattaaaacagagaatttctatttgttaaaagatccctattgtaaacaaagacaagctataaactgggatattttcaacacatatagttgatacagaataaacatccaaaatatttttacaaagtcctataataataaaaagacaacccaaagaaattgagcaaagggtttcagtaggcatttcacagaagaggaagggccaataaacaagtctttaaaatcttaaccttattagtaagcagagaaatgcaaattaaaaccaaaatgagattctactgcatatacatctaccagaatcacctgaacttaaaattctgagcatttcaaatgttagtaaagagtatacattggaaaatcccctttggaaaatattgcatattgcctagtaaagttgagaatatttgcatggtatatgtactctgtgttcagtaatatattcttcatatatatcctagaacagggcttagcaaactatggcccacaggctagatcctgccttggcataaagtttcactagaacacactcgttcttttacatattgtctatggctgtgatttcatgatacaatggcagagttgagtagttgtgacagaaactgtatggcccgcaaagcctaaaatatttcctatatgtccctttgcacaagaaagtttgatgacccttgccctagaacagcctctgcatgtccatcagtaaacatgtacaagaatgttcgtaatagaactataaattcaaactttgaagcaactcacatttctatcaactgagaatggattttaaaaactgtaatatagtcaagcaatggaatactgtaccataaaaatgaatggattatagctacactacttaatctcaggaacataatgttgacaaaaaagcgagtcacagaatgatatatgaaatagttatataaaactcaaaaacatccataaacaacatagttttggagtaagtagctgaaactataaagaaaagcaagagaattataaacataaatctcaggataattgttatgtctgaaggaaaaggggatagaaatgggaatagatgtctaggagtcttcaaagttagtagttaatattttcttttggctgggcgtggtggctcacgcctgtaatctcaacactttgggaggccgaggcaggtggatcacctgaggtcaggagttcgataccagcctggccaacaaggtgaaaccccatctctactgaaaatacaaaaattagctgggcatggtggtgcgcacctgtagtcccagctactcgggaggctgaggcaggagaatcgcttgaacccaagaggcggaggttgcagtgagctgagatcctgccactgcactccagcctgggcaacagagtgagactccatctcaaaaaaataaatattttctttcttaaaaaaggtagttggtacacaggtttttgctgtattgagaattaaaaaaatacatatacttcataaatattattttgtatctactctatatttaatagaaactatctttgaaacatacgaatttaattaaaagacagggtgaaggttaaattcttttggtaggtcataataaagtagactcaatttcctccaatggactggagcctctaaggcaaatactcgaataacattgtaaaatatgatttctgttgactgaaaaactgggcttgaaaaaccaacggtttcattctacctgattcttcctccctcaccaagactctttcatttcttttttaaccatatctttctttcccattatctgataaggaaattataatgggcttaaaaacttagaaaccatcttgcatatcgtaaaagataagaaattggtcagactctggctgtggaattaagacccatttccatggttgtcagggaagcaaggccatcctaggaagggctaaagaaagctacaatcagagttgcctccacacgattctgcaaagctctaattattttctgagaacaagggacaaaaattcaggcaagcacacagaatccacaggattcacaaaggaagaagatactccagattgtaaattttaatttgggggagaagatgtccttccctagccagatagattcttctagtttccaatataaaatctgtaaataatctctctgaattcagttatctctactccttttaggaaaagtcttgaaggtcactggccactgcaatgaaaaattgttaatcacacaaagccagggtcaagattcatgacatagatggccattgtgaatgaggaactattcatatatatttcaggattctcaatccaacaacagtagaatggttaaaaaggattatgatgatcaatagacactatgtaatctttaatatgttccaattaaaatacatcatattaacaaattttaattttgtaatattcaaaatgttttctgtcattatttcaaaatactaatgatgtctttttaaatattatgaacatttaaaaggtatatgcattttattgcaatattttgttttaaaacatgaaaaaaacagattacaaaatagtatgtagtaagtgatgtttttgatatgactgtacaaatatttaatggcatttgaaaagatatgtgtttatcttttgattgtgataccactggtggttttaaaagttttcttttcctagggctggccagggtggctcatgcttataatcccagtactttgggaggctgagggaggttgacttgaccctaggagttcaaggttaccatgagccatgattacaccactgcactccagcctgggtgacagagcgagaccccatctctttaaaaaagaaaaatgtcactgacataatactgcgtaaaattttaagattcattttgttaatttaaaatttataatcctaagtttattggatgcataacattctgctccctgtgtactataaattacttaactatttctttgttgagaatatacattgaaaagatcatctcaaaaattctcctcacaaagtggctaattccaagtctgggacagggaatgcacaatataagtacgaaatatctgtgccaggttgggcgtggtggttcacacctgtaatcccaacactttgggaggcctaggcgggtggatcacttgagatcaggagtttgaggccagcctggccaacatggtgaaaccctgtctctactaaaaatataaaaaaattagccgggcatggtgacaggtgcctctaatcccagctacttgggaggctgagacaggagaactgcctgacccgggaggtggaggttgcagtgagccgagccgagatcatgccactgtactgcagtcttggcgacagagcgagactctgcctgaaaaaagaaaaaaaaaaaaaaagaaaagaaaagaaagaaagaaaaaggaaaaaaaagaaatacctgtgtcaaaaagtaaggaagtgctcaaagacaaatggggacacgggcaccagcgtcaggggttcttacaggccaatttggaacaatttgagcaacacagaggatgataacaggctaaagtactttggacaaaaaataaaaatccatgagccatagtgatattcaaaagagaaaaaataaagaggtatagagggaaagggtggaaaggcaaagctcttttatatacaagaaggaatggtaaaattaaaaatcaccattttgcaactcctaacttaataactgatttagacaagaatcattaatgattattaaaaccatcaggtaaaaggctatttgggaaatggtttcaaaatatccccatcagattacttcttagcctcaaagaaaaaaaggtatttttttaccatgaagaaatcaggtgcacatctccttgaaccaaagtaataaaatttagtatcattggtaatggatcaaactgaaattatgtgtcacttaatatgatgcaataggaagaacacaccagcattcatagttttcttgccaaatatatttaaacttaacctaattatgacagagcaatcaaacaaatccagaatgttaggcattctacaagacaaatattctggacccttcaactcttaaaaaatgtcatgaaatacaaaaacaggctgggggaatgctgttctagattaaagaaattaaaaagataggcccacctactgtaatgtgtgaccttaattgggaccaggatggatattttaaatacacatatcagacatttgggaaacactagggcaatttaaatgtggactatatattagataatattatgaatcattgttaaaatttatatgtatattcatgatatcgaggttatgcaggagaacaaccttgttcttcgagatgcgtgctgaaatcctcaatggtgaaatatataatatctgcagcttacccataaatggtgaacaaaaaataaacaaaaatatgtaaatacatgcagacagagattaagcaaatggtccaaaatgttaaaaactggtgaatctaagtaaaggatacacagtgcaaatcattattcttttaattttcctgtagctttaacatttttcaaaataaacacttagggaaaagtaattatatcagagtgcctcagatacttttttgggattgctgattaaatgctagactcatacgtactggcataaacctaatctgttggaagaagttcaaaatcatttgccaacatcaacaaagactctcaaagaaaataatccagtgccaggaaagagaacatacttaccaatgctgtccagggtcagacactataacggagctgaatccagtaactgggctgaagagataactaatccttaaaggtcagcaaggtcaaaatgggttataaggacataaatatgaaactggcatttcataaacaaacaagacacctcaggcctatgaaaacttgttgccttactattcccttctctctgcagtcttcctaaggtgtaagtttttctggattttgtctgcttccacagtttaggttccttggctcacttccttgctccaaaaccaacgtctctattgacttttatattttaaaattaaattttaaatatatgagtgatgctaccttgctaaaagagagagagaggccgggcgcggtagctcacgtctgtcatcccagcactttgggaggccaaggtgggcaaatcacgaggtcaggagttcgagaccagcctggctaaaatggtgaaaccctgtctccactaaaaatacaaaaaattagctgggcgtagtggcaggcgcctgtaatcccagctactcgggaggctgaggcaggagaatcacttgaacccgggaagcggaggttgcagtgagctgagagcgcaccactgcactccagcccgggcgacagagtgagactctgtctcaaaacaaaaacaaaaacaaaaacaaacaaacaaacaaaaacagagagagagggagagaaatgacctataatgcttaagttccctttgacatttacttctccccctttaccctaaatcctctcttctctccctaaaggttaccattagcaggagttttgtgtgtatccctctataaaatatatactatttttatactaattatatcacatagtattctaacaaatccttctcagttcctgcagtctacgtttctgatggtcttaaccttttttagcttaaagtacctctttgtgaatctgaaaagctgcctatactttttttaaaaaaatcacatatcaacacatataaaatgtcataagtttaatatacaagaagcccatccacatggaatctattcatctcaggtgaacaactgttttttacttttaagtgatagcttcctttttcttgcaagcactcatcgtaactattcaaaagccaaaagtagtgacccagaatcacacagatgcggctcaagatcaatgcatgctgttcaatttgaaaccagaatgtgtctgtcacctcctaaaaaaaaaaacaaaacccagtatatatctcccatatataattggacataattcttttttatttttatttttatttatttattatactttaagttctagggtacatgtgcacaacgtgcaggtttgttacatatgtatacatgtgccatgttggtgtgctgcacctgttaactcatcatttacattagatatatctcctaatgctacccctccccctacccccactccctgacaggccccagtgtgtgatgttccttaccctgtgtccaagtgttctcattgttcaattcccacctatgagtgagaacatgtggtgtttggttttctgtccttgcgatagtttgctaagaatgatggtttccagctttatccatgtccctataaaggacatgaactcatccttttttatggctgcatagtattccatgatgtatatgtgccacattttcttaatccagtctatcattgatggacatttgggttggttccaagtctttgctatcgtgaatagtgccgcaataaacatacgtgtgcatgtgaattggacataattcttgcctgactttgacccactctaactcagtgcaatttaattatctatatttcacatagctatgcctgatcacacacacaggttcattccctcaagaattctgatcaccaaatttgctattccagtcacattaccggtaagagatcaatgtatttgatatatggtcttgcaagaccaagttttattaatttttttccctctgaaggagtggtgaaattatactctatcttctctgtgctggaagttcacaagtttttgattattcaaaaatcataaaaggccaagaggtcttgaagtaagtaaaaataagttcaggtttaccaacaaactctacagccttaagttactttctgccggccaaggttttctcatcagaaaatgaggacaagtgtttgacctagaatttgggaaatctgactagtgctgtactgtgctaaaattcactcttcttatgtataacgttgttttattattttattagttgatggcctctcaaccgtacccagtaataagagaaactttaccctctaattagaaaataatggatatctacttttggcctgctgtggcagaggaaaaggcagttaccctaggactggttttgaaataatctttctaaaaacaaagaaaaaactacgttaattttggattcttcccgataacacatatatttgatccaatagaaaaatgatgtctaaattacttgtcagataaattgattatcttttccagattattacattactatttaaggaagaaataacttggccatagtattttcactgtcacacacgatcacacacagctcatttgctcttggcacccttacagacactgaaatacaagcacaaagaaagcacgtttatataacacagatcaccagttactcaattacggccacacacaaaaaagcagatatacatacagatacccttcataagcaaaccacaatagagatctgtgtaaaatcgtcttactctgttagacgattctacacagttataaaatcccattactacgcagcttaaagtacaaatcacctcacaccccacagcaggaagaatcacacacaggcagaaacacaaccatacacacccggccacggaaagactctcagtccacctggcatctcccattgtcacacacaccccaagggcctgggagggcacacacagggtcctctgcaaatccgaggttccggcgggtccccgcaccggccccagctcctcccccgcacctgcctggccggcgggtcccaccctctctcctgccaggggtagaccctgggaccactcagctcgctctcgcaggccctgagcgtctgacgcctgcgcactgagcgcgggcgggcgggcactcccagaaacctccggggcgctgcaggcgggacaagcaggttccacaggccgagcccacgagcccctcgaggggtgagcggcccgggcctcctggcgttctggccggctagccaagcgctggactacatttcccagaggcacggcgtccggagcgctggactacatttcccagaggcaccgctcccggagcgtagcttcatttccgttagtttgcgagatttggaggcctcgcgtggggagagggccgcgtctgtggaggagcttggctccgcacctgctgggctggcgaacccgaaattgggcttggaacccgggagccagatcttggaccctgaactgcacctctgtcaaggtaggagtgtccgggatgccggagcggacacgcgcggagaaagcgtcgctggggttactcgtgtggccgtgtctccggttttgtgtgcaggctacagcctgcctggtattggcgactgcctgtgcatacacgactggacgtgtgtggctgtggttttgtgtatgagcatttgtatgagtgtgagttgtgactctgagggtgtttgtgactgtttgcttacctggctgggatatacttatgtgactgtgattttatgtgtgccgcgtgtataattggggtttgcctgtgactatgaagtgtgtgacagttgtgacaagagtgtttggatgttcttgtgtcactttgaggttgtgtgtaaacctgatatcgtgggatggatttgccagtaaatttaaggtgtgtgacagtgttgctgtgacacggtgtttattaccgcgtgtttccctgatttcgtactgggttgggtgactgtctgattgtgtgtgactgtggggttgtgtgtgctgttttcatgactgtgtaaagagactaaaattgcagctttgaaagggtgtttttggcggtatgtgtctctgacaaggtgcttggatgtaattatatgccttgtacttaatgggattttgtttgagacaaggtggtctaacaatgtagcataattgggtgattgtgcctctagctgtgtaactgtggaaatgtgattatgtgtgactttatgtggccatttgtatattctgtgaccttatgggggtttagtccagtacagaagtaaatttctttttggtatttctggggttcatttggggctgaggtctgcctatggattgtgagtcccatgtggctctgtgctcctcccatgtggctctgaggacttaaggactttttgatttgaccacagtggctgccctttcatccatggcctgtattgcttcatttctgtatccatcctcggttcaccttgggaaatgtagttacttacgagttcacgacttcttccctgcgtcctcttgccttatagccttaaggggattgggtgcagggaagtggcaagaagtaaggaagtcagacatttggacacctgagtgatgaataggagttatttgcaagttacagacctggtcttaggatgagaattttagggctgataataccttcaagacagccactggatgctgtgcgcggtggctcacatctgtaatcccagcgctttgggaggcagaggcgggtggattacctgaggtcatggtttcaccatgacctctactaaaaatacaaaattagctgggcgtggtggcgcatgcctgtaatcccagctacttaggaggctgaggcaggagaattgcttgaacccgggaggcggaggttgcagtgagccaagatcaagccactgcactccagcctgggcaacaagagtgaaactcattctctaaataaataaataaataggccactggaaatataatgggactccaggagtgggaatagtttcagagggagtgctttaggagacagccacccagttctgaacctgaagcaccccactgcaggactgtctccagtgtacagctttgaatacagaaataaattcaagcccaagacagctgtgacctggcccttctttctgatacagaaggtagaagacttattctagtctcctcctgacttttctttatgttaaatgagattaagaggatggaggaagagggtatgttataatttagcatattccccaagaaaggcctaatatctcattccatttttctttttctgagagtagagcccagaggagaaagaatggctgtttcagtagcaatgtccaaggtgagtatttcctctttgtttcctgaaatacctttgttattacaggacatagacatttttgttttctttttgaaatttcttgccttctcaaatgatagaggggcaaggcaatttttggtagattgagagcaaagaaaatgtgccattaatcgggatagatgcttccccaatagtggttaaatttacgaagaatggatttgagactcatggatttaaaaaggggaagagagaaatagctctattgtgttatttaaaaagggaaagagctctattgtgttatttctgatacagcaccattttgattttttaactttttttagcttgttatggaaagtttcaaatgtacacaaaagtataatgaatatgcctagcttaaaaacgatcacggccaggtgtggtggctcatgcctataatcccagcactttgggaggccgaggcggatggaacgaggttaggagatcgaaaccatcctggaaaaaggtgaaaccccgtctgtactaaaaattaaaaaaaaaaaattagttgggcgtggtggtggatgcacatagtcccagctactcgggagactgaggcaggagaatggcgtgaacctgggaggcagagcttgcagtgagccgagattgcgccactgcactccagcctgggcaacagagcgagactctgtctcaaaaaaaaaaaaaaaaaagcgattactttccaatcttgtttcatttattctaccttcagttcaaaatcctttctaatttgcccctttgatttcttgacttataggttattttgatgtgtcatgttttcaaatattttgaggatcttccagagatcttttgttactgatttctaatttcattacattgtgttcacagaatatacttcatatgattttaatccttttaaatttattaagatttgttttatgacccagaatttgatgcatcttagtaaatgttccatgtgcacttgaaaagactatattctgtggttgttgggtggagtgttctataaatgtcaactaggtcaggtaggttgatagtattttttaaatcttccatatctttactgagtttttatttgttggatttttctccttgtagtttctttcagtttctgcttcatgtattttttttttttttgaggcagagtcttgctttgtcacccaggctggagtgcagtggcccaatcttggctcactgcaacctccacctcccaggttcaagcaacctccacctcccaggttcaagtgattctcctaccttagcctcccgagtagctgggaatacaggcgggcacgaccatgcccagctaatttttgtatttttttttttttttttttttttttagcagagatggggtttcaccatattggccaggctggtctcaaacttctgacctcaggtgatctgcccacctcggcctcccaaagtgcagggattacaggtgtgagccactgtgcctggcctgcttcatgtattttgatgctctgttattaggtatagaaaggttttagatttttacatcctactggtgaattgacccctttatcattaggaaatggtcttccttgtccctcataatattctttgctccaaacatctactttgcttgatatttaatgtagccattccagctttcttttcattaatattagcattgtgtgtctttttctatcctttttcttttaacctgtttgtgtttggtatttcaagtgcatttcttacaggcagcatgtaattgggtttgtgtttttattcaatttggcaatctccattttttgttgttgttgttactgttgttgagacagagtctcactctgtcacccaggctggagtgcagtggtgtgatctcagctcactgcaacctctgcctcctgtgttcaagtgattctcctgcctcagcctcccaagtagctgggattacaggcacacaccaccacacccacctaatgtttttgtacttttagtagagacggggttttgccatgttggccaggctggtctcaaactcctgaactcaggtgatctgcctgcctcggcctcccaaatttctgggattacaggtgtgaacaaccacacccaaccagcaatctctatcttttaattggagtatttagtccatttatatttagtgtgattattgatatggtttggttcaaatccatcattttgccatttgttttatatttatcccatctgttctttatttcctgttctcccttttctgccttcttttggattgagacagagtttcaaaataacaataccaatattttaaccaaccatatgaatatagaaaaacaacataaagtcctgttggagtttgacaggatatagcccactagggatctataatcaaattactgtgtttaaaagtcgtctacaataacacttctcgtatggttaagctgccagctggaaatgcagttatgctcatttgttttatattgcttttcatgtttagggattgcttttctcccactatgatttaattttgttttaaaattacataacatatatctaaaatcaaaagtacagaataagatgaatttgaagaagtctagtgtccatttctgtcccctctacctgctcctttcttccctctatagtagctggggctacaggcacgcgccaccatgcccagctaattttttgtattttagtagagacagggtttcaccatgttggccaggatggtctcgatctcctgaccttgtgatccgcccacctctgcctcccaaagtgctgggattacaggcgtgagccaccatgcctggccccgtttttgctttttttttttttttattttagtaatccatcatacatagtgatgtgcacttctctgaagtagggcatagtatctggttgttttcctttatgtgatgttaacagccagctactgacatctttatgtgaatatgttattttatcagtggttacagaattatattctaattcttctgcatttattagctggactatatctataaagggagccatcctttctcaatgtcttggttacctgaagaatagtttatgcaaaaagaaaaactggaatgaaagattggtttttctcttattatttttcagcatctttcaaagcttattctgtgtttttcttttaaactattattattaacttgtgtattaaaacatatctgttatgtttcgatctgtgacaataactgttcttattaatgctcacattgttccatgtatggcaagtggaaggtttaccctctctgatttgtctgcttttggattcctttttattctttttgacatgaccccagtagtctttggcagattccagactttccgtgctgacagagtattccaggctcattttgtacaatttcctgtcccaaacataaaatcagccacttctttatggagccctggttccttttataagaagtgcttttaagaagtcacaacaaggatagtaggaactctcattgctcctagttgtcattgcttatagccttaacagagctggtgaaatacaaattttttagaaggagaaaaaaaatcctgagtgtatactgatatttccaattgaaataaaagattatagagtttttcttactatctttgattttatatttgtgttttataatctgaaaaaatcttaattcgtaatgattaatgatattaagattctcactgatatatgtgtgtgtataatcatttcaggttatatacatatattacttttagactaacaatgccaatattattaataacagtataactactgaaaaactctaagacataacttcataaagttataaactcttaagacaactttgaaaaacagtttatagttattttgtttgtaggttatattgggtctaatgtcaaatgactgtattttaaagttcccgaaaataatcacttcctttatatgtttaaccttccagctttatgcacagataagtttgtttcattttgcttttatttcttagagattttttttcattttgatttaattttgtgattatagttatagaaaacatacttgtggttccaaagtcaaatagatttgattggtaatactttataactttgttgtatgtctgtcttcctagaagctattgagctgtaacttttttcatgtaatatctttgtgaggttttagtattatggttatttggcctcaaaatgtagaacagactgctgtctcctttttctgttttctgaaaacgtttgtgaaagaacagtattatatctgccttaaatattggtagaatttaccagtaaagccatctgggccttctctgtggacagtttatttgtttgtttctcacattcaatttctttaatatccatgggatgatttgtatttctgttttttcttgtgtgaattttggcaatttttgttttaaggaatttgtctatattgttgaaattgccaaaattattggcatagaattgtattatctttttaattaaagccttaaaaaatctgtggtccagtctccactttggtaatatttttttttgaaaacttgataggggtttgtaaactgtattaatcttttgaaagaattgatttttgagtttgttgatattctctattgtaatctactttatattgtggattttgtgcttatttttattctttcttttcttcttactttcagcttcacttgctcttctttttccagcttcctaaggtgggagcctaaatcatttttctaacataagcatttaacactattaattttcctctaaatactgcttttgttgcagctcacagaatctgataagtgtgtttccattgtcactcagttcggcatatttttcaatgtctttttgcatgggttatttagaagtatgtttaatttccaaatatttggagattcttgttactagtttgtaatttaataatatgtggacactgaccacagtatattctctgtataattcagtttttaaaatatttactgttacttgttttatgacccagcatctggtttattttgatgacctttccatacgcagttgttaatgaagagtctgactcttgctaaaatcctatgtgtgggttctcaggctccaccaggtcattcctggcaggccacacaggggaaaggtggcctccccgcagcagacttggtgcacttctagtgcattacagtctctaaagggagttgcagtgcaggactcaggcctcccagaccagccatgctgttatgcgtgtttacattcctaacccaggcacctccattaggaggcctctttatcaggtgcctctgccaagaggacatcctaatctaggggagaggggaaactttgaagacactttctttccccactcttagtatccggtagttttaatttttttctttatttcttttttctttcttctcttttctttttttttaacatatttttggagacaggatattgctctgtcgcccagactggagtgtagtggcatgatcatagctcattgcagccttgaactcctggacagttcaagcaatcctcctgcctcagcctcccaagtagctaggactacaggtttgcatcacaatgcctggctgatgttttattattattattattattattattattattattattattattttgtagagacagattcttgctatgttgcccaggctggtctcaaacttctggcctcaagtaatcttcctgcctcggcctccccaagtgctggggttgcttacaggcatgagccaccgtgcccagccaggcctcactactttttcactcttagcccttcccttgtcttcttgtcccctggtcccagtccataaaatgaatgataggagctttttgttctgcattcccttagcagtgagatgactcacttctgcactgatccacatttgcactgatctgcctgaccctctctgaccctctccaggtgctatttcatggttggggttgggggagtgaaacagtggagtactcagcgctttctctgggttagcctcttaaattaagtgactactaagtgattaaaggctggttgtgttaatcacttattccaacaccttgcagctcagttctcttcagcccagcttggcttttggtaagtgggtgtggtattctattaatatatatttatcatcttggccaaggtacttgatatagtggtatgtaaatcctctatattgttatcgattttattgtctacttgttctgtcagttactgagcaaaagattttacaattcccaactctgtgggtttgtctctttcttcctttagtactgtcaatttttgcttcacacattttgaagctttgttgttaaatctctacatttggattgctgtcttcttgatgagttgatcctccttattgctagtatttctctttatcttgaagtctattttgtcttatactaatataggcatacaagctttcttgtgattagagtttgatggtgtatcttcccattttacttttagcccatctttatatttaaaatgtgcttcttgtaaagagcatgtagttggaacatgcatttttatcttgtcttgttaccatttttttattggaatggttgaactattattaatacaatttagtttaagctctgccatagatgggagcatccatatgtggctcttaagaagagcttagggccacatgtggtggcttatacctataatcccatcactttgggaggctgaggcaggaggattgcttgaggccaggagttcaagaccagcctgggcaatgtagcaaaacctcatcccaacaaaaaaagtaaaaattaggtgagtatgatggcacatgcctgcagtcctagctacttcgaaggctgaggagggaggattacttgagcctaggagttcaaggttacagtaagctatgatcataccactgcactccagcttggttgagagtgagaccctgtctcaaaaaaaaaaataaataaataaataaataaataaataaataaataaataaataaaaattaagagcttggcacttttttggagtttaggtcttttaaatttgtgccctcagctctctgatgaatttaaaagaaattatgacttttcatcttatctgaattatttttaggttgttaggatgggcccaagtatctcttgcagaaatctatatgttgaagaagtcaaattttcagttaaaaatgtattgagcacctgtatcaatgattctctgcaggggcagttattctccctagagggtgttttggaaatatatctaggtactgttgaatgttaaagtaagtgggttgagggtaaagacttctagcttttttgtttgtttgtttgagacagagtctcactctgtcgcccaggctggagtgcagtggcgcgatctcggctcgctgcaagctccgcctcccgggttcacaccattctcctgcctcagcctcctgagtagctgggactacaggcgctcgccaccacacccggctaattttttttatttttagtagagacggggtttcaccatgttagccaggatggtctagatctcctgacctcgtgatccgcccgcttcggcctcccaaagtgctgggattacaggcgtgagccactgcacccggccgatttctagcttttgaaggagtgaggtctcggatctaggttagagattacccaactttttctgtaaagggctagacatttcatatggctttgcgggccacatggtctctgctgcaactcttcagctctgctgctgtagtgtgaaagtagccaaaggcactatataactgaatgagtatggacgtattccaataaaaccttatttacaaaattagttggtagacagtagtttgccaagttatgatttagttgtccatcagtgcataacaaaaaattgtctgtgatttgcaaaattgagaaccatacctggaaaaaatgtgtttatgattttccaggtctggaatctcttacataatgcattttgtgcatgactttttcaatttgctgaatttatctactttcctattattggatggttttactattagctgtatcttccaggaatgcaaccatgatttgattgagaaaaaggctctacttcgcttaagaaatttactgagttttttttaaccatttcaaaaagttatagtattgatggcaatgctaattgtgttatttgtcttgcctatagcaaatatgtatagaaacctccatttatagataatgcatttctatttattctatacgtacacatgaacacacatatatttagcctttatttcaaaatgtcaaatataaaaggtgtcaacaatacttagttacatattgtcattttataagtctaaatttcttcattataagtaattgtaggcataagcatttaattatttgtgccttctaatgtagttgtgtatgatcataaatatattgaaatattaagttgttcattatctccatttttgacatctatagatgtgtcgttattacctatgagtttcatttcagaagtagtagagacattgttatattttctttttgtatatagaaagcattgagtttgatcaagttaagaaccacaacatatgtctgtcccccttagtgtgtgttttgggggtgggagaaacaggaagaaaagaacaacaaagataattccaactgaatcatttgttactttgcaaaacacctggtctcatggttctgctttctcctccgtagctctgcattctccagactctgtgctttcctaagataggaacccagaagaggactgatcatttcttgcagctctaaaaaccatggctcgggtaaattggagtttccttgtgctcttttcacttacttttttacagagcatgtgtgtgtttgtattccttactcctgaaacttcattcctaactgacctcactcaggaatgtgctcctcagtttgtcccattctgataagtgatagtgtcttccctaagtgtgtctttcgaatctaacctttagtcacatacttactcaacaatatgtatattgttcagtaatctttgactaggaacactgatctaacaaaagtagagttccctgatttcataaggtagaggaggatgttaaatggcaccacacatgaaaaccttttgaacttctctttagatctaagttcccaggtagacaagacaggagttggtcttgactgggctcactctcagtatgtggcaagcgctcatgctttatgagtttttaagattaggaagatgattagggactgaatacagagagatcagggatcttccccaggaacatataatttaatatggatcaatttgaaattcgacattatgtgctggtcttgaatgtataaatttggattatgtttttcacctttctattgtttagaatgatgaaaagttacatttacggatgaatggtaaatatgatcatagtgaagatgatcattcaccagcagaagttgttgagaattataaactctgagaaccaagaaatacttacaagatttttacaacctaaaatgttcaaatatgagcacttattaagtcagacatattcattatatggagctattctgtagcctataaaatatttactaaattattgatgacaaggaaaatgtttatgatatagtactctgatctaatggtgaatctggagcttcaataaattctttaattttatacaaatcttattttataaggttttacagaaaaattttaccattttgtttattccttaaataatgaagagagaaacttacatttattgagaatgtatgatacacaatatacatattgtataaaatgcttgtgtatgctacttcttttaattgggacattgcatttattttattcccagacttatctgtaaagtaagatgttctgtatgcagaaaatatgtgtagcaggccaggtgcagtggctcacacctataatcccagcactttgggaggcctaagccttaaggccaggaattcaagactagcctgggcaacataacaagacccctgtctctacaaaaaaattggaaaattatcagggcacagtggcatgtactgtgagtggcacgtactgtggtctcaactactcaggagaatgagacaggatcacttaagcctaggagttggaggctgcagtgagctatgatggtgccactgcactccagcctggatgacagagcaagaccctgtctccaaaacaacaacaacaaaactatagcaataggaataatcaggaacatatttgtacttttcagcccatgtgctctgttgcttcctttgtggagggatcttcatctccctctccattgaaaaagtatttttttggccgggcacagtggctcacacctgtaatcccagcactttgggaggcctagtcgggtgaatcacaaggtcaggagttcgagactagcctggccaagatgatgaaaccttatctctactaaaaatacaaaaattaactgggcgcagtggcaggtgcctgtaatcccagctactcaggaggctgaggcaggagaattgcttgaacctaggaggcggaggttgcagcgtgccgagatcgcgccactgcactccagcctgagcgacagagcaagactccatctcaaaaaaaaaaaaagaaagaaaaaaagaaaagcattttttaaatttccaaaattaacattttgtttgttgtttcagaaattagtgatgttcagggatgttgccattgacttctctcaggaagagtgggaatgcctggactctgctcagagagatttgtatagagatgtgatgttggagaactatagcaacttggtatcactaggtaaggaatctagccttcatatttcaggatctacctttggattggctgctttctctgctgttatttcaaatttcctttttaagtaattaactgaatttcttattcttttcaaaggaggagtttgaaattactggaagtagacatggtttctcagggcacctttatcttttccatccttcaaaaagccttaccactgccttctaataccatcttccctgatgaacaaagggctagatttgaagtttgggatacttggaatattggcagataaaacagcctatacattgttacactttagatctgctaaaggagctctaaataattcacacgcccagtcacagatttaaaaaatagatgcagagatgtatgttttttctgataaaagagtttacatcatttgtatagtgatagagtagatcaatgcatttcaccaacaactcaaatgaagacaacccattaattagaacaaacacattgtcttatatgtgcttggtagttgaatattacatattaagaactttgggctgggctcggtggctcacgcctataatcccggcacgttgggaggccaaggtgggtagatcacctgaggtcaggagttcaagactagcctggccaacatggcgaaaccccatctccactaaaaatacaaaaattgagctgggcatggtggtgtgtgcctgtaatcccagttactcaggagattgagggaggagaattgcttgaacccatgaggtggaggttgcagtgagctgagatcacatcactgtactcctccagcctggatgacagagcgagactccatctcaaaaaacaaaaaaaaaagaacttgcattggacattgaatgaatatgctagaatcatcttttattgtaaaatagttgagggggaacctgtgattgtctaagaaactttattgttttcttctgtagtatttttatatgaaacaaaatccgtatcaattacaactttaataagtgattttccaacctacatgataactttattccttgtgctggaataaactgtctcttgcctcttccttcctttctcctctgaagcctttaggaagtcagtgattaacacatgtccctagaggacccaagtggtgtggaaaaaaacctatgacttgaggagaaaagcaagggtttttcaccatgatcttcctaaagactcttacctaatttctactgcgtcctttccctgttggtttttattatcattcttcccactttcaaaagagggaatggttggccgggcgcggtcttgtatgtgcttggtagttgaatattacatattaagaactttgggctcggctcggtggctcacacctgtaatcccaacactttgggaggccgaggagggcggatcacctgaggtcgggagttcgagaccagcctgaccaacatggagaaaccccgtctctactaaaaatacaaaaaattagccgagcatggtggcgcatgccagtaatcccagctactctggaggttgaggcaggagaatcgcttgaacctaggaggcagaggttgcagtgagccgagattgtgccactgcactccagcctgggcgacagagggagactctgtctcaaaaaaaaaaaaaaagtgcaaattaaaaccacaatgatatagttatttcacatgctataaattggcagcttgacagtaccaggcattctcaagatttgaaggcagaagtgcactatatcttgatattcacaatagccaaaaagtgggaacaacccaaatgtccatcaactaatgaatggataaaatttggtattttcttaaaacgaaatattattcagcaataaaaaggaatgaagttctgatacatgctttaacatggatgaaccttggaaacatgctataaagaaatacccgaggctgggtaatttataataaaaagagatttacttagctcatgcttctggaggctgtacgagcatagcactagtgtctgcttggcttctggtgaggtccaggaagcttttagtcatggtggaagggagggggagtcggtgtgtcactggcaagagagggggcaagagagagaggaggaaattcaggctcttttaaacaaccacatctcgcgtgaactcatagcgtaagaactcacgacagagtcttgctctgtcgcccaggctagagtgcaatggcccaatcttggctcactgcaacctccttctcctgggctcaagcgattctccttcctcagcctccccagcagctgggattacaggcacctgccaccacacccagctaatttttgtatttttagtagagatggtatttcaccttgttggccagactggtctcaaactcctgacctcgtgatccgcccacctccctcccaaagtgctgagactacaggcgtgagccagtgcacccggccaagaactcactctttaccacaaagatggcacgaagctattcatgagggatccacccccatgatccaaacacctcccaccaagccccacctctgacactggagattacattcaatgttagattacatcaacatgagatttggaagggacaaacatccaaactatatcccatgccaagtgaaagaagccaaatacaaacactgcatattatatgattgcatttatatgaaacgtcctcaatagggaaatctatactgacagaaagtaggttactggttacccagcactggggatggggaagaggtagaacagatggagaatggggagtggggagatgagaagtgactgctaatgaacacagacagcatttctcttgggggtgaaaaaatgtttaaaaattagattgttgtgattgttgcacatctcagtgggtatactaaaagccactgaattgtgcagaaataatatggaaatggttgccaaacttgtgtgtactttagaaatagctacggtcttttaaaaaattccacagcccaggccacaccccagaccaattaaataataatttctaggcatggtacatgagtatcatattttttgaaattctctaggtttttcaaatgtttagccatgtttgataaccactgcactgtggtattatctgagaattttttttaattgaatgttcactccatttaatttattaccaatatacttggatttatttatcccctattttatgctttttgtttcctctttttatcttacgggcttaaaaaactttctccctccttaatgagggtggatacaatcgtgttttattttttgcaactccattttcccccttgttttgtttggaaaacgtacagtatttatttatttttaaaagttatctttaaatttttatcatgtgtacctaattccttttaatgtcaatggtattttatagtttttattgattgtaattgtgtctgaaaattatatatttaatggacattatatattttgatggatactaaaacatatttattcagtccacatacaatatttggtttgcatattgctttgcaataaacttgctctatctccacccctaggatttcaaggccagcaagttgaaaaacagacatataaataatagtatctactgtgaaataaattggtaacctttgtggcaattagttgaggttctaaggagagataagaaattgacatctctatgtcaaatatatattttattgtcacagaattcttatcagaagtataccagcaatgtatatctattatatactttatcaacagtggctattagcacgtagaaatatctttgttaaggccaggcgcggtggctcacgcctgtaatcccagcactttgggaggctgaggcgggcagatcacgaggtcaagagatcaagaccatcctggccaacatgatgaaatcccatctctactaaatatacaaaaattcggtaggtgtggtggcacatgcctgtaatcccagctactcaggaggctgaggcaggagaatcgcttgaacctgggaggcggaggttgcagtgagctaagatcgcgccacagcactccagcctagtgatagagagagactctgtctcaaaaaaaaaaaaaaaaaagaaatatctttgttgatttgtagatgaaaaacagaagaacatttctgccattgccggtgaatttaaatactttgggggtatttctgcctgttttggtactttagtaattatcattattgtttgtgtcacttgacaaatacatgcttaatttagtgaagtctaaaattcatgtctaactttccttaagataattaaaggatattgaaatgctttaactttgatctgtttctccaatctggtattgttgtctggtattttagttctgttctttttttaacctacaaaatgggcattatttttgtttcataatggcaatgtttgcttgtggatttgttgatgtaattatcttttatttgtatgctattcctctttcattataccttccttctgggatattttatttatcatgaaatacattagggaaggcttattggttttatttttttcttttcttttcttttcttttttgagatggggtctcattcttgttgcccaggctgtagtgcagtggcgcaatttcggctcactgcaacctccgcttcccaggttcaagcgattctcctacttcagcctccccagtagctgggattacaggcgcccgcagccaagcccagcttattttttaatttttagtagagacggggtttcgccatgttggccaggctggtctcgaactcctgacctcaggtgatccacccacctccacctcccagagtgctgggattacaagtgtgagctaccacccccggcctgtcttattgttaataaatgctctaagtgtttgtttttgtcattgttgcaaaataaccttgtttcactgtcattcttgcctgatgatttaactaggtataaaattctatactgacaattatttttttctcagcactctgaagatattattccactgtcctctggcttctattgttgctcttgagaagtctgccatctgtttcattgttattccttttgtaagtaatctgtattttctctggctgcttttaagatttttttctttaagatttaaatgtaattgattatattgtttcacttctagatgtttgatgttctccccctctcccagatcttttttttttaagctcatccctttctcatggtttttatcttatactttcatatatttccagcacttatgtgtcatacaatcccaatttctgggaaacaggtctaattttgctgtttcttgtatccatggggactcttgtgtaatgatgaattatccatagcactttttttctccttttctttgagagtccaggccaagactgaaaagtcccttgtcattttcctttaaggtttgctggatttgtttttctttctctgaactttatgtcttgaatatttccaattttgtaaagaggtttgtttgtaatccctgctcttttgttgaggaaaggtcttgtctgttcagttttttcagaccattaatatacaaacatctaggtaattaaaatcaacaaatatcccaagggtaactgtaacttcagagcatatttactccatctactttctggttcctacttcattgtagcacccctggatcttgtttactttcttttatgcttcacatacttttaaaaggacatctgtcatatttttccagtatttgttagtgttttttaagaaatcggatgcaccatttacatattaacaatattgaatccttttattgttcagcatgctaaatctgcttttctttttatgttctctgtaaagtttcatggttttttcttattcttttttttttttttgagacagagtctcgctgtgtcacccaggctggagtgcagtggcgtgatctcggctcactgcaacctccgactccccagttcaagggattctcctgcctcagcctcccaagtagctgggactacaggcacctgccaccacacccagataattcttgtatttttagtagagacagggtttcactatgttggccaggctggtcttgaattcttgaccttgtgatctgcctgcctcggcctcccaaagtgctgggattagtttcatggttttttcttaaaagatcttgcacatttcttaagcaatttctcagtacattttgtttataatatgaataggaatattttgttctgtaacattttctaaatggctaatactgatatatattatatatgagaaagtattgatttctataaattgaaaatcttatggaaatatagtttttcagtggattatagtggatttctaggtggacagttttgctctctacatacaatatgtggtctcttccttttctgtttgtacctttaaaaaaaggcaactaaattcagtaggaccctgtagcggaatttgaaaacaaatcattcttatcttttctcaaactttattggcagtgtttctaatgtttaactattaaatgtatttctatagacatctggtagatactcttaactaggtttttacctaattccagttttagagaacttttaataaaaggtcttagaatatattaaaaatttttttgcatttcttgaaatcatgctattttattctttaagttctttatgtgggaaaatggactctgatgttgaattattcctgcatttgtgggataaagtttatatgatcatgatgtgttatgccttaaatacacagctagattctatgttcctaatattttcttttaaaattttacctttgttcacgagattggcttcgttttcctaaggtcatttttcaatgctgttatactagttaatttaactttgtaaaatgactagggtagattacaatatttttatatgttcaacaacagttatgtacgattggaattatatatccttttttcttttttttgagacagggtctccctctgtcacttaggctggagtgcagtggcctgatcacagctcactgcagcctccacctccctgagcccaggtgatcctagttgagactacaggcatgtgccaccatgcctggctaatttttgtagtttttgtagagatgaggttttgccacattgcccagactagtctcgaactcctgggctcaggcaatctacctgccttggcctctcaaagtgctgggattacaggtataagccaccacacccggcctatatattctttaatgtttggataatattgccagtaaacctaccagtcactggaatctattgccttgaatattagatataataggtactatgaccagcagatacaaatgatcatcagtcataggtatctattgccttttaggagcacagacactgagctcaaatttaaattttttatgtggttattgctgtatatcagttattatatcttcatgggttatttttcatgtttttcatctgtttcatccagttctaatttactgttgcgttaataggttttttcataaacacttttaaaagttttgttttattttagttgaaacataatgcacatatttatgggctaccatgtgatgttttatacatatgtgtattgtgtaattatcaaatcaggataattagcatatctgtcacctcaaacacttgtcatttctttgtggttaggacattcaagatgctctcttctagctatctgcaggcattcaggacatttttgttgactatatagtcaccttattgtgcaatagtacatcagaacttatttctcctatctaactataactttgtacccatagaccaatctcttcccagccaccccctcagcatctggtaaccactgttctactctctacttatatgagatcaacttttttaggttccacatatgagtgagatcatgtgatatttgtcctgttcttggcgtatttcacttaatataatgtcctctagcttcatccaagttgtcaaaaataacaggattttattcatttttataggttaatagtattctattctgcatatataccacatttttgaaaatccatttatcttttgatggacactgagttcgagtccatgttattgctattgtggatagtgctgcagtaaacatgggaatgcagatgcctctttgacatactgatttcctttcctttggatgtatacccagtagttagattgttggatcatatggtagttctatgtttacttttttgagaaacctccatactattttccataatggctgtgctaatttacattcccaccaagagtgtgtaagagttccccctttttccacatttttaccagcatttgttatcttttgtctttttaatagccattctaacagcagtgaggtgatatctgattgtagcttcgatttgcatttccctataattagtgatattgagcattttttcatttacctgtttgccatttgtatgtcttgagaaatgcctattcaaatcttttgactattttttaatcagattatttgtttttttgctgttgagttgactttcttatatattcttggtattaacaccttattagatgcatagtttgtgaatattttcttccattctgtaggttgtctcttttttgtttgctttgagatggagtctcgctctgtcacccaggctggagtgcagtggtgcaatctcggctcactacaacctccgcctgccaggttcaagtgattctcttgcctcagcctccagagtagctgggactacaggcacatgccaccacgcccggctaattttttgtatttttagtagagacggtgtttcactgtgttagccaggatggtctcagtctcctgaccttgtgatctgcccgcctgggccccccaaagagctgggattatagatgtgagccaccatgcccaggctgtaggttgtctctttactctcatttcctttgctgtacagaagctttttactttgatgtagtatgtttatctgtttttgcatttgtcagtgcttttgaggtattattaaaaaatccttgcccagatcagtgtctgtttccctgtgttttcttctactggtttcatagtttccagtcttacatttaagtctttaatccattttgagttgagtggtgagacaggggtctagtttcattcttttgcaggtggatattcagttttcccagcaacatttactgaagaaagtatccttttcccaatgtgtgttcttggccttcttgttgaaaatcagttggctgcaaatacttggattttttttttcctgggttctctatcctgttccatttgtctatgtgtctgttttcatgccaataccatactgtttggttactattgttttgtagtatattttcaagtcatggagtttgatgcctccagcttggttctttttgtacaagattgctttggcggcctggcgcagtggctcacacctgtaatcctaacactttgggaggctgaggcaggtggatcacctgaggccaggagtttgagaccagcctggccaacatggcgaaaccccatctctactaaaaatacaaaaaattgctgggtgtggtggcaggcgtctgtcatcccagctactcaggaggctgaggcaggagaatcacgtgaacctgggaggtggaggttgcagtgagccaagagtgtgccattgcactccagcctgggcgacaagagcaaaactccatctcaaaaaaaaaaaattgctttggctgtttggggacttttgtggttccatatgaattttaggattcttctttgtatttctgtgcagtgtcattggtggtattttgatagggattgcatagcatttgtagattgttttgggtagtatggacattttaacaatgttaattcttctgatccatgaacatggaaaatatttccacttattagtttcctctttaatttcttttgtcaatgtttatagttctcattgtaaaactcttgcctctttggttaaatttattccttttttttttttttttgctatctattataaatgggattgatttccttttcacagtttcctgttggcctatggaaatgctacttatttttgtacattgattttgtcagtcattagcaccttattttgttcatttgttgagctcatattttcctgaatgttcttgatgtttatggacacgtgatgtctgtgcactgagcaatttattcaagagtttgcaggccggaacctggtatctcacgcctgtaatcccagcactttgggaagctgaggcgggtggatcacctgaggtcaggagttcaagaccagcctgaccaatatggtgaaaccccatttctactaaaaatacaaaaattagctggccatggtggtgtgtgcctgtagtcccagctactcaggaggctgagacaggagaattgcttgaaccctggaggcagaggttgcagtgagctgagatcatgccactgcactccagcctgggcagcagagcaagactccatctcaatcaatcaatcagtcaatcaatcaagttcacagtctagctttgtttgtgcccatccttcttccaaaggccttccagacattctaagcagactatctatctgttgtattcccttgagcctgtaaccactgcatccatctcagcattaaagggcattaagcccaggcttcctgctagccttgcaagggctccaaggttgttgtggctctccacctgggtggacctagagaaaacccaagaaggatactggtgctgtatgggagtccagacagggacctgagcccagaagactgtcctggtggcccagatgggtgtgccttcagcaggtccttgcacaggcaagataggtctctaattacagtgagagggctggagctgagactgggccccctcaggatttgctgtcctacaggacagaggctggcaagcctatcttgttggcttagacaggtgtacatctcccagcatgtctctgcacagatggggtagttctatgactgcaacaggaggggctagagcttagactgggccctctcgggatctgctgtgggacagaggcttccatgcacagatggaatagttccctgactgcagtgggaggtgctggagctgagcctggaccccctgaggatgtgctatgggatggcagctgatgagcccatctcagcccacatgggtgtgtctcccaccgtgtctacacggaggggatagttctccagttattgcaggagggcccaaggcaaagactgggcttcctcaaggtctgctgtgggacagaggttggtgagcccatcgtgaagactccaactcccaaaccatgagatacggatgaatcttactctggatccttgtatgagcggttctgagctggcacccccagctgaggaggctggagctaagccacagagcaactgtgaggttcactaccaggactgttgtcagcaggcataagagactctccacctagacactagtgtgcatgattcctcctggacctttaggcagatggttttgattgcacgcccaaggccaaatggggctgtagccaagccctctggggaatggggccattttcaagctttgaacatgggatcagcatgggagatcagccacctgcgtgccagtctgcactctcaaaatgactttcctaggtcttgggctttactcaagttttacaacctcctacctgaattccaaagcttctgcaaagagacttttatctgtggatgggtgcagaattctcgtgaggggatatgagtgggttacctcctatttctgccatcttgctgacgtcactcccataatctctcataaacactttttaactcctcaatttatggttacctttttctctccagtgctttggatttgtgctaaatctaatttttttctacacgtcactttttttgtattatttatggatattttcaaataattttggtattttgattttgctaattatttctgctgtttctacgtttctaatttactcattttctgattttttatctcacttatattttggtttttagttatgctttttgctcacttcttcttgaggtgaaatcttaattctcttaactatagtatttcttgttttttaataaatgcacttaagactgtaaatttccctgggtacaattttagctgatttcttgggatttcacacaaagtttcttttgctatttggctctaaattgttttaaaattttatttttatttccttctataacaaacatcatatagaattgtcttagtaacttaattctaggattatatgttttttctatgtttttataatttttagttttatgctaatgtgataattaaaaacattttatgtcagttttatctatcttcctatattactaattatgttatagtcttccttgtttttatttctggtctgtttatattctattctctactatgacggtgattaatttctctatatgtctgctagtttttgtttatttaggagctaagttgttggttacataatggtcatgactattcatcctcttgcctggctcttagatgatgtccctgagctgatctcactgagaaaactgaagctagcagaagagaagagagattcttgcttccttgtctgtttacctaccttcatctatactaattcaacctcttttcctattaacatgtaacctttttgtgcctttacttaagcccagtaccctcacttgtatactgaattccattccttctcatatttttaaggacactgttgaagcaattgccctttgtctcttctaacatgaacttgtccatatcttttacaataattttcatcagcatacaaacatgccttaatttcttctatcttaaaaggaaaaaaaacaaaaccaaatattttgacacacattttcctcttgatatagctccatttctttgctactttttacagaaaaatacaaaagaattttccatattccctaactccagctcttctctcattttttttttgtctttttttttttttattatactttaagttctagggtacatgtgcacaacgtgcaggtttgttacatatgtatacatgtgccatgttggtgtactgcacccattaactcgtcatttacattaggtatatctcctaatgctattcctccccccttccccctcccccgaccccacaacaggctccattgtgtgatgttccccttcctgtgtccaagtgttctcattgttcaattcccacctatgagtgagaacatgtggtgtttgtttttttgtccttgagatagtttgctaagaatgggtttccggcgtcatccatgtccctacgaaggacatgaactcatccttttttatggctgcatagtattccatggtgtatatatgccacattttcttaatccagtctatcattgatggacatttgggttggttccaagtctttgctattgtgaatagtgctgcaataaacatacgtgtgcatgtgtctttatagcagcatgatttataatcctttgggtatataccaggtaatgggatagctgggtcaaatggtatttctagttctggatccttgcggaattgccacattgtcttccacaatggttgaactagtttacagtcccaccaacagtgtaaaagtgttcctgtttctccacatcctctccagcacctgttgtttcctgactttttaatgattgccattctaagtggtgtgagatggtatctcattgtggttttgatttgcatttctctgatggccagttgatgatgagcatttttccatgtgtctgttggctgcatatgtgtctgttggctacataaatgtcttcttttgagaagtgtctgttcatatcctttgccgactttttgatggggttgttttcttcttataaatttgagttctttgtagattctggatattagccctttgtcagatgggtagattgcaaacattttctcccattctttaggttgcctgttcactctgttggtagtttcttttgctgtgcagaagctctttagtttaattagatcccatttgtcaattttggcttttgttgccattgcttttggtgttttagacatgaagtccttgcccatgcctatgtcctgaatggtattgcctaggttttcttctagggtttttatggttttaggtctaacatttaagtctttaatccatcttgaattaatttttatataaggtgtaagggagggatccagtttcagctttctacatatggctagccagttttcccagcaccatttattaaatagggaatcctttccccatttcttgtttttgtcaggtttgtcaaagatcagatggttgtagatgggtggtattatttctgagggctctgttctgttccattgatctatatctctgttttggtaccagtaccatgctgttttggttactgtagccttgtagtatagtttgaggtcaggtagcatgatgcctccagctttgttcttttggcttaggattggcttggcaatgcgggttcttttttggttccatattgaactttagtttttttccaattctgtgaagaaagtcattggtagcttgatggggatggcattgaatctataaattaccttgggcagtatggccattttattgattcttgattcatcattgattcagtatggccattttacgatattgattcttcctatccatgagcatggaatgttcttccatttgtttgtgttctcttttatttcactgagcagtggtttgtagttctccttgaagaggtccttcacatcccttgtaagttggattcctaggtattttattgtctttgaagtaattgtgaatgggagttcactcatgatttggctgtttgtctgttattggtgtataagaatgcttgtgatttttgcacattgattttgtatcctgagactttgctgaagttgcttatcagcttaaggagatttcgggcagagactatggggttttctaaatatacagtcatgtcatctgcaaacagggacaatttgacttcctcttttcctaattgaataccctttctttctttctcctgtctgattgccctggccagaacttccaacactatgttgaataggagtgatgagagagggcatccctgtcttgtaatgcttccagtttttgtccattcagtatgatattggctgtgggtttgtcataaatagctcttattattttgagatacatcccatcaatacctaatttattgggagtttttagcatgaagggctgttgaattttgtcaaaggccttttctgcatctattgagataatcatgtggttttgtctttggttctgtttatatgctggattacatttattgatttgcatatgttgaaccagccttgcatcccagggatgaagcccacttgatcatgggtagataaactttttgatgtgctgctggattcggtttgccagtattttatcttctctcattcttttgaatctggttcagtcagaacttgctcccattattctgccaaaactattattgtgaagattaccagtaatctccattttgctaataatgccatttttaacttaggaagcacgatttaggccgaacacggtggctcacacctgtaatcccaccactttgggaggccaaggcagggagatcacctgagggcagaagttcaagatctgaaggggtggcctgcccctccatacctgtgggtgtttctcgtcaggtggaacgagagactgagaaaagaaagagacagagacaaagtgtggagaaagaaaagtgggcccaggggaccggtgcttactggtctctgagttccctcagtatttattgatcattatctctaccatctcggagagggggatgtggcaggacaatagggtaatagtggggagagggtcagcgggaaaacatgtaaacaaaagtctctgtgtcgtaaacaaggttaagaaaaggtgctgtgccttgatgtgcacgtgtacaaacatctcggtgcattaaagagcagtattaccactagcatgtctctcctccagccctaaggtggttttctcctatctcagtaaatagaacatacaattgggttttacactgagacattctattgcccagggacgagcaggagacagatgacttcctcttatctgaactgcaaagaggccttcctcttttactaatcctcctcagcacagacccttttcgggtgtcgggctgggggatgtcgggctgggggacagtcaggtcttacccttcccatgaggccatatctcaggctatcacatggggagaaatcttgggcaatacctggctttcccaggcagaggtccctgtggccttccacagtgtattgtgtcctgggtacttgagattagagaatggtgatgacttttaacaagcatactgccttcaagcacttttttttaacaaagtacatcctgcatagccctttggtaaatccattaaaccttgagtcaacacagcacatgtctctgtgagcacagggttggggctagggttacagattaacagcatctcaaggcagaagaattttcttggtacagaacaaaacggagtctcttatgtctacttatttctgcatagacacggtaacagtctgatctctcttttcccatttcccccttttcttttggacaaaaccgccatcgtcatcatggcccgttctcgatggtcgctgtctctttggagctgttgggtacacctgcagactaacaacagacagaacaggcacacaaggattaataggaaatttacaatagtagaacttccgatggtcttaacccaagtgacagggttaagatttgtgagaccatcagcaactccatgattgcctcagttcctggtaccaaatttaatgggctttgatccttcaaaaatttgttcttttaatttggaaatgtctaaagtgagattatcttttcttccctgtagacggcatctaaccatgtcccagtgatgctcagactcattataaactccaggtgtaatacaaaaatctgacgtattccagtcacactgtaactggaaatgatgttctaagctcatgagcctatctcccatccaaatgacagtctaagatcattaatttgatttgccaatttttgatcaataccagattgtgaattccaccatcttgtagaattcttttgccaatcattaacaaagtttactgtccgaacagaagagtgcaatgcaactcctgccacagcggctgtagttgtgactgcgattaatcccataatcactgcaattaaagtaaaaatgaatcttttggatctatttaaaatgacttttaatacttcagtcaaaatatggatggatggcgaggcctcccactgtcggtccatggacacagggatccacacgccttcccttgctctcactagcagaatacggtgctgccaattgaaagttgaatcaatgcaagtaaacaatctgcaattttcacaggttatatagtttgggagtctggtttaataactatatttcctacaactagcatataagggcgctttatacaactttgtaaagaaaccgttagacttgaatttaggtcgatagtataaaatggcttatgatctcctgtttctatagcttgatttccagatcaaattctaatgcggtatgaggccacagtaagcctccataattctggatgttcaggaccagaaacaggacttattatttttggtcttggagtagagattcctttttctccccattcccaagggtagaaagactgtaattttttgtgcttatgtttgtctaaactttctgttaagtcactatcaacagttggactcacttgtgcactgggacatgactgagtttgtcctgtgcaattgtggtagaattgacctcgaggtgcccaatctataatagttccaaattcatcattttgtaatatcaccacactattggccacacattcttcctaaactaaaacttctgtgtcttttgataccttgggaatttccgtggggcaaggtttccctttaggcctacattttaatgatctttgataagaaaagtcctgtaaataatttacctgtggcctgagtgacattccgcttaccatgtgataagtgaatctactggtggtacagtaagtaagtacttctaccaaccaattttggattgtaggcattaaacatcctggtgttctccctagacaaataggaggataacgatacccagtagaaatatttatcgtcattccttcttcctcaggtttggcagggcagtgatcatctgtggggccaggtacccatacactgttattaacatatacttcaataggattatccatccatgcgactgcccgaattaagggcaggaaaggcacacaggcccagtaggtataattagctgcagctgctcctacaggcatggggagacttaccaccattgatacaatcatcaaagctgcaagcagcatactctctggagtttgtgtcacctttgtgttctcaaggccttttttagctaactgtgtcagcttctttaattgtgcccaagtcggcggctctgccttcttggtgaatggcaacttcatctattcttctgacatcaccattttatcttgtgagttgatggtgcttgattgcagtgtttctgtctccgtggaggtgcttttctttgcatctccgacaggttcattgtagaacttcaaatgtctagttggtatccaaacaggaagctgattttctcctggtgaaacacaagcaaaacctctcctccacgttaccaccttccctatttcccatgtcttattgttgttgtctttccaccaaatcagttttccttcatgtgggctattcttttttttaccagtaagatgttgttctgcaggagtagtagtctgatttctataaatgtttaaaaaatttaaagtatagagtgctagattaagttgcatctgaggagtggtacactccttactgtctcccccttctttttgtttaactaattgagttttgtgtgttctattagttctttcaactatggcctgtccttgggaattatagggaattcctgttgtatgtgtaattttcttggaaagctttactacagtatcctggtccattgttagttttaattttttctggaactcccattacagcaaaataagataataaatgttttttaacatgggaagtactttctcctgtctggcaggttgtccatatgaaatgtgagtaagtatcaactgttacatgaacacatgataatcttccaaatgaaggtacatgcgtgacatccatttgccataacgcattaggacacagacctctgggattaacttctgcctcttgagtgggcaggtgtaggacttgacactgggtgcaatgttgtacaatattttttgcctgtttctatgtgacatcaaatttgttttttaatcctgctgcatttgcatgagccaaagcatgaagttcttgtgcttttatgaatgcagatgataccagtaagtcagcttgttcatttgctttagtcaaaggccctggtaaattagtgtgtgctcgaatatgagtaatataaaatgggaaatttctttttcttacagtttgttgtaataaattgaatagctggtttaactgatcatccatgctatatttgattagagctgtctcaacatcccttgtagcctgtactacatatgcagaatctgatacaatattgatagattgatcaaaatcttataacactgtaatgactgcaaccaactctgctctttgagccaattgatactgagttttgattacttgctcttttggctctgtgtaagctgcttttccattgttggaaccatcagtatatactgtcagagcattttctaaaggtccgtgactggtaattttaggtaaaatccaagtagtcaattttaaaaactggaggatttttgtttttgggtaatgattatcagtaattcccacaaaatcagcaagaccaatctgccatgcaccagaattgataaaggcttgtctaacttgttccttggttaaagggacaactattttgtctgggtcatttccacacaattttattattcgtaatcttgcctgaccaattaatgtagctatttgagccaagtataatgtaaaagtcttaattgtactgtgaggaaggaatgaccactccacaagatcagtattttgaacaatgatgcctgttggaaaatgtgcagtagcaaaaatcaaaagttggagtggggctaagggatctattctatttattgcactgactgaattttttcttccactaatttaatttcttttgttgcctctcgggttaatattcttttactatttaagtctgggtctcctcttaagatagagaacaaatttgacatggcataagtaggaatacctagagttggccaaatccaattaatgtctcctagcaatttttgaaaatcatttaatgtttttaatgtgccttttcttatttctattttttgtggcttaatttttttattttctatctgcatccctaaataatgaaaaggagtagaggtttgaatcttaccagatgctattgccagtcctgcgttggcaacctctgcttgcagaaatgtgtaacagtcaattaatttgtctctcgtttctgcagcacatcaaatatcaacgtaatgaataacagtctgaaaacttatctctaactggttgaagagcttgacctacgaaagtctgacaaatagttggactattaagcattccctgaggtaacactttccactgaaacctggtggctggttctttattatttatggctggtatagtaaaggcaaatttttcacaatcctgctccaccagaggaatggtaaaaaagcaatccttcagatcaattataattaaaggccagtcttttgggatcatggccggagagggcaaccctggttggagatgccccatgggttgaattatggcatttacggcccttaagtcagttaacattcgccatctgctggattttttctgaattacaaacacaggagaattccaaggcgagaatgaaggctcagtatgtccgttttctgattgttactttgctaataaatgtaaagcctccagttttcgttttggtagcagccactgatttacccatacaggtttttctgttttccaagttaatggagtgggtttaggaggatctacagtggccgcccctaaaaaggataccctattgctgctgtttcttgatttccctcaatctcaattgggactttaatgccattttcattttttcctagtccctttcctggtatatatcccatcttagtcgtgattttttgatttgtggggctatataatggggcaggcatagtgatttcctcaccccattgttgtaataaatctcgaccccacagattaacgggaattgaagtaatcattggctgaacagtactttcttgattatctggccctaagcaatgtaaaatctcagcactttgatacacttctgaggcagtgcctacgccgacaagtcctgtaacagccttttgtttaggccaattttttggccaccgattgaaagcaatgatagagacatctgctgcagtgtctaccaacccctcaaactgttttccttgaataatggccttacacacaggtctgctctctgagacctgacttgcccaatatgcagcctagctggatcagtgcttccaaaccctcctgttctttttatctcactgttttcaaccttaatataaggcaggaataattaagcaatcctgtctcctggactggcactccaaggaactgaggagctaataaccaattgaatttcgactttgtagtctgaatcaaccacaccagtatgaatttgaactccctttagatttagactcgatcttcctgagattagtcctacagtcccctcaggccgtgggccatatatccctgtggggatttttttgtgggggctccctggaagcagagagactgcttgtatagtacacaaatctactgctgcactgccgcttgtggccggggacagttgctgtattgtggtaactggcccattccctgaagcacttgtgacagtgggggttgttgtccctgaaaaccctgaggaacaaagggctaaattgggaatgccccagtttgttgcggggcctgaggctggcccctcttctcgtttcccgacaatggttgcccatttttatcaaatttagaatgacattgactagcccaatgttttccttttttacctcttggacataagtcaggtggctctttatctgttcttgtagtagtttgaatagttatattttgtttatttgaggctgggcaattctttttttgatgaccaatttgtccacaattataacattttcccctaaatgttctaacttgtcctcctaaagcaagtcccgttattgcttgagcgataagcatagctttatgcatagctcctccaattccatcacaggcttttacgtactcttgagattacatctgatcccactgggacctttccttttaatggtttaatggctgattgacactcaggattggcattttcgtatgccatcaactccactatgaccttacgggcattctcattggtaattgacttttgagcagcatcttggaggcttgccgcaaaatcagggtagggctcctttagcgccttgtcttattgtattgaatgaggggcaggcggttcctgggtcttggcttttttcccaggctctaaggcagataggtctaacttgctcagtggcctcattttacattattgcttgttaattagtagtgctccaattttgacctgttcctaatagttgatctgcatctatgttaactggaggattggcagccctatttttttggacctgttcttgtgccccatcaatccaccaagtcttcaccaagtcttaaattgtaaacattgagagggtgagagcgatcatttggccaaaatctcccaatcataaagaatgagtctatgtccatgagcaatggaatctaataatgtcctcatataaggggagttgggtccatactgttttactccctctttcatatcttttagcatttttatggaaaaggactcatatctggcctcagctaggggaggcgctccctcttgggcctcttcttcaggtggtatcggttctaatattactgggaattgccatgcctcggtatctccttgttttcttgccttatcaataattttatgtaatgcactaccctgtccactaggtggtggtgtaggattaaatctcatagtgggctgctgaggatatagcgccctgccctgtggtgctggaaacattcctggctgtccatactgattttctgggggcggctgatcctgaagttcggctggcggccagtattgataggttactggcggttgggtcttattttccaccggctgatattgtggatactgtatttggattggcattgccgtgacagagactctatctttccctatttgatattcttttggggtttgtacttgtctaacctgcatttgaggttgtaatgttacaggcatctgaactgctgggagaggagttggccatcgtggtttagactctgatggccccactaattctggacctttttcttctaattttaacatttcaggatatatcacttcctgtaattgattatagtcaacattttgcattgaccgaaccattaccggctctgctacatatttacaatgtgaactttccgttcctttcccagattctatccctgcctcttcttcacaatctattacacattttccagggcatcagaaactgaaatgctatcttctcctgtttgaaacagttctaaagctactttaataatggcccaatcattccatactgtaagtgggatgattttaccctccctacttgcttgttttaattctttgccaattttttcccaatcttttagatctaaagttccccgttctagaaaccatgggcagaattgttctattgtttgaaatagagtgattagattttttttgtagagactctgactccccctctttttaaaagaattttaatggagctaagaggcatatttacttttagtttgtcccattgttaccctggcttcttctgagcgcacaagtttaccgcaaagggtgaccatagacgtactcaggaatctctcgttgacttgtcctcattgaccacgctcgagcgtaccttcaccctagagaaaagcacctacgttggacacccgatgaaggagtggcctgcccctccacacctgtgggtgtttctcgtcaggtggaatgagagacttgagaaaagaaagagacacagaaacaaagtatagagaaagaaaagtgggcccaggggaccggcgctcaccatacggaggacccgcgccagcactggtctctgagttctctcagtgtttatggatcattatctctaccatcttggagagggggatgtggcaggaccgtagggtaatagtggggagagggtcagcaggaaaacatgtgaacagaggtctttgtgtcataaataagtttaaggaaaggtgctgtgccttgatgtacatgtatacaaacatctcggtgcattaaatagcagtattgctgctagcacgtctcacctccagccctaaggcagttttcttctatctcagtaaatagaacatacaattgggttttacactgagacattctattgcccagggacaagcaggagacaggtgccttcctcttatctcaactgcagagaggccttcctcttttactaatcctcctcagcacagaccctttacgggtgttgggctggggggcggtcaggttttcccttcccacgaggccatatctcaggctatcacatggagagaaaccttggacaatacctggctttcctaggcagaggttcctgtggccttccacagtgtattgtgtccctgggtacttgagattagagaatggtgatgacttttaacaagcacgctgccttcaagcacttttttaacaaagcacatcctgcatagccctaaatccattaaaccttgagtcaacacagcacatgtttcagggagcacaaggttgggggtagggttacagattaatagcatctcaaggcagaggaatttttcttagtacagaacaaaatggagtctcttatgtctacttctttctacatagacacagtaagaggctgatctctctttcttttccccacaaagaccagcttggccaacatggtgaaaccctgtctctactaaaaatacaaaaaaatttagccaggcatgatggcacacgcagggattcccagctaccttggagctgaggcaagagaattgcttgaatccaggaggtggaggttgcagtgaaccgagatcacaccactgcacttcagcctgggcaacagagcaggactccacctcaaaaaaaaaaaaaaaaaaaaaagaatgcaccatttcgcctcatctctcagcatttgacataaccgatcattccttcttaaaacactttttttggaaaatatgggtggagccaagatggccaaataggaacagctctggtctacagctcccagcatgaacgacgcagaagacgggtgatttctgcatttccatctgaggtaccgggttcatctcactagggagtgccagacagtgggtgcaggacagtgggtgcagcacactgtgtgcgagccgaagcagggcgaggcattacctcactcagtaagtgcaaggggtcagggagttccctttcctagtcaaagaaaggggtgacagacggcacctggaaaattgggtcactcccaccctaatactgcgcttttccaacgggcttaaaaaacagcacaccaggagattatatcccacacctagctcagagggtcctatgcccatggagtctcactgattgatctcagactgctgtgctagcaaactgcaaggcagcagcgaggctgggggaggggtgcctgccattgcccaggcttgcttaggtaaacaaagcagcctggaagcttgaactgggtggagcccaccacagctaaaggaggccttcctgcctctataggctccacctctgggggcagggcacagacaaacaaaaagacagcagtaacctgtgcagacttaaacgtccctgtctgacagctttgaagagagtagtggttctcccagcacgcagctggagatctgagaacggacagactgcctcctcaagtgggtccctgacccccgagcagcctaactgggaggcaccccccagtaggggcagactgacacctcacatggccgggtactcctctgagacaaaacttccagaggaacgatcaggcagcagcatttgcggttcacgaaaatcggctgttctacagccaccgctgttctgcagccactgctgctgatacccaggcaaacagggtctggagtggacctctagcaaactccaacagacctgcaggcgaggctcctgtctgttagaaggaaaactaacaaacagaaaggacatccacaccaaaaacccatctgtacgtcaccatcatcaaagaccaaaagtagataaaaccacaaagatggggaaaaaacagagcagaaaaactggaaactctaaaaagcagagcacctctcctcctccaaaggaatgcagttcctcaccagcaacagaacaaagctggatggagaatgactttgatgagttgagagaagaaggcttcagacgatcaaactactcccgagctacaggaggaaattcaaaccaatggcaaagaagttaaaaactttgaaataaaaattatacgtatgtataactagaataaccaatgcagagaagtacttaaaggagctgatggagctgaaagccaaggctcaagaactatgtgaagaatgcagaagcctcaggagccgacacgatcaactggaagaaagggtatcagtgatggaagatcaaatgaatgaaatgaagcaagaagagaagtttagagaaaaaagaataaaaagaaacaaacaaagtctccaagaaatatgggactatgtgaaaagaccaaatctatgtctgattggtgtacctcaaagtgacagggagaatggaaccaagttggaaaacactctgcaggatattatccaggagaacttccccaatctagcaaggcaggccaccattcagattcaggaaatacagagaacgccacaaagatacttctcgagaagagcaactccaagacacataattgtcagattcaccaaagttgaaatgaaggaaaaaatgttaagggcagccagagagaaaggtcaggttacccacaaagggaagcccatcagactaacagctgatctctcagcagaaactctacaagccagaagagaaggggggccaatattcaacattcttaaaagaatttccaacccagaatttcatatccagccaaactaagcttcataagtgaaggagaagtaaaatcctttacagacaagcaaatgctgagagattttgtcaccagcaggcctgccctaaaagagctcctgaaggaaacactaaacatagaaaggaacaacctgtaccagccactgcaaaaacatgccaaattgtaaagaccatcaaggctgggaagaaactgcatcaactaatgagcaaaataaccagctaacatcataatgacaggatcaaattcacacataacaatattaactttaaatgtaaatgggctaaatgctccaattaaaagacacagactggcaaattggataaagagtcaagacccatcagtgtgctgtattcaggaaacccatctcacgtgcagagacacacataggctcaaaataaagggatggaggaagatctaccaagcaaatggaaaacaaaaaaaggcaggggttgcaatcctagtctctgataaaacagactttaaaccaacaaagatcaaaagagacaaagaaggccattacataatgttaaagggatcaattcaccaagaagagctaactatcctaaatatatatgcatccgatacaggagcacccagattcataaagcaagtcctgagtgacctacaaagagacttagactcccacacaataataatgggagactttaacaccccactgtcaacattacacagatcagcaagacagaaagttaacaaggatacccaggaattgaactcagctctgcaccaagcggacctaatagacatctacagaactctccaccccaaatcaacagaatatacattttttttcagcaccacaccacacctattccaaaactgaccacatagttcgaagtaaagctctcctcagcaaatgtaaaagaacagaaattataacaaactgtctctcagaccacagtgcaatcaaactagaactcaggattaagaaactcactcaaaaccactccactacatggaaactgaacaacctgctcctgaatgactactgggtacataatgaaatgaaggcagaaatcaagatgttctttgaaaccaatgagaacaaagacacaacataccagaatctctgggacacattcaaagcagtgtgtagagggaaatatatagcactaagtgtccacaagagaaagcaggaaagattcaaaatggacaccctaacaccacaattaaaagaactagaaaagcaagagcaaacacattcaaaagctagcagaaggcaagaaataactaaaatcagagcagaactgaaggaaatagagacacaaaaaaaaaccttcaaaaaattaatgaatccaggagctggttttttgaaaagatcaacaaaattgatagactgctagcaagactaataaagaagaaaagagagaagaatcaaatagatgcaataaaaaatgataaaggggatatcaccaccaatcccacagaaatacaaactaccatcagaatactacaaacacctctatgcaaataaactagaaaatctagaagaaatggataaattccttgacacatacaccctcccaagactaaaccaggaagaagttgaatctctgaatagaccaataacaggatctgaaattgtggcaataatcaatagcttaccaaccaaaaagagtccaggaccagatggattcacagccaaattctaccagaggtacaaggaggagctggtaccattccttctgaaactattccaatcaatagaaaaagagggaatcctgcctaactcattttatgaggccagcatcatcctgataccaaagcctggcagagacacagccaaaaaagagaattttagaccaatattcctgatgaacattgatgcaaaaatcctcaataaaatactggcaaaccgaatccagcagcacatcaaaaagcttatcccaccatgatcaagtgggcttcatccctgggatgcaaggctggttcaacatacacaaatcaataaatgtaatccagcatataaacagaaccaaagacaaaaaccacatgattatctcaatagatgcagaaaaggcctttgacaaaattcaacaacccttcatgctaaaaactctcaataaattaggtattgatgggatgtatctcaaaataataagagctatctatgacaaacccacagccaatatcatactgaatgggcaaaaactggaagcactcactttgaaaactggcacaagacagagatgccctctctcaccactcctattcaacatagtgttggaatttctggccagggcaattaggcaggagaaggaaataaaggttattcaattaggaaaagaggaagtcaaattgtccctgtttgcagatgacatgattgtgtatctagaaaaccccattgtctcagcccaaaatctccttaagctgataagcaactacagcaaagtctcaggatacaaaatcagtgtacaaaaatcagcagcattcttatacatgaataacagacaaacagagagccaaatcatgagtgaactcccattcacaattgcttcaaagagaataaaatatctaggaatccaacttacaagggacgtgaaggacctcttcaaggagaactacaaaccactgctcaatgaaataaaagaggatacaaacaaatggaagaacattacatgctcatgggttggaagaatcaatatcatgaaaatggccatactgcccaaggtaatttatagattcaatgccatccccatcaagctaccaatgactttcttcacagaattggaaaaaactactttaaagttcatatggaaccaaaaaagagcccgcattgccaagtcaatcctaagccaaaagaacaaagctggaggcatcatgctacctgacctcaaactatactacaaggctacagtaaccaaaacagcatggtactggtaccaaaacagagatatagatcaatggaacagaacagagccctcagaaataatgccgcatatctacaactatctgatctttgacaaacctgacaaaaacaagcaatggggaaaggattccctatttaataaatggtgctgggaaaactggctagccatatgtagaaagctgaaactggatcccttccttacaccttatacaaaaattaattcaagatggattaaagacttaaacgttagacctaaaaccataaaaaccctagaagaaaacctaggcaataccattcaggacataggcatgggcaaggacttcatgtctcaaacaccaaaagcaatggcaacaaaagccaaaactgacaaatgggatctaattaaactaaagagcttctgcacagcaaaagaaactaccatcagagtgaacaggcaaccaacaaaatggtagaaaattttcgcaacctactcctctgacaaagggctaatatccagaatctacaatgaactcaaatttacaagaaaaaaacaaccccatcaaaaagtgggtgaaggatatgaacagacacttctcaaaagaagacatttatgcagccaaaaaacacatgaaaaaatgctcatcatcactggccatcagagaaatgcaaatcaaaaccacaataccatctcacaccatttagaatggcaatcattaaaaagtcaggaaacaacaggtgctggagaggatgtggagaaataggaacacttctacactgttggtgggactgtaaactagttcaaccattgtggaagtcagtgtggtgcttcctcagggatctagaactagaaataccatttgacccagccatcccattactgggtatatacccaaaggactatatatcatgctgctataaagacacatgcacacgtatgtttattgtggcactattcacaatagcaaagacttggaaccaacccaaatgtccaacaatgatagactggattaagaaaatgtggcacatatataccatggaatagtatgcagccataaaaaatgatgagttcatgtcctttatagggacatggatgaaactggaaatcatcattctcagcaaactatctcaaggacagaaaaccaaacaccgcatgttctcactcataggtgggaattgaacagtgagaacacagggacacaggaaggggaacatcacactccagggactgttgtggggtggggggaggcgggagggatagcattaggagatatacctaatgctaaatgacgagttaatgggtgcagtacaccaacatggcacatgtatacatatgtaacaaacctgcacattgtgcatatgtaccctaaaacttaaagtataatttaaaaaaacaacaacacatttttcacatggcttctggggttccgtgctctcttaatttttctccttcctcaatggctattccttcttagtctccattgctgtttccttctcatctacctgaagtgacccagggttcaatcctcaaacttccctttttcatccttccccttctgttttgtatataaaggtacgccctgggtgacctcatcaaatcttgtagctttaaatgttatttcgtgatgactttcaaacttatatttgtaatccagatacctccccagagtcacatacttacacatttgtgtctattgaacatcttcatttgatatctaatagttcaaaaccagacttttcacaatccctcccaggtctgccccatcacagtgaggagttctcagtaagtagcacttccattgttccaacctttcaggcaaaacctgcatagtcttccttgtcttctcttttcatgttacatgtccattccaccaacaaatcctctgtagtataccttcaaaatatatccactatctaatgatacctcacttcctccacccttacctccaccatcatctggtctgagtcaggtggattattgttgtagccgcctaatttctatccatctagcttctgtactttcccattaactatctttgtatttactaattttggctccccaactcagagtaaaagtcgattttttaaagatggctgagactgaggtcagatggattttttcctgtctctgaactttaggccttgaataggttccaattttgtaaaatggtttatttctaatccctgcccttttgtgggtgaaggccttgtctcttgaattttttcagaacactaagatacaaccttaggctattgaagccagcaaatgtcccaagggtagctctaacttcagagcatgttcacctctccagtttctggctctcagctctcacttcattgcttgacttctttattttcttttactcttgtctttttttttttttttttttttttgagcggagtctcgctctgtcacccaggctggagtgcagtggtgcaatcttggctcactgcaacctccacctcctggttcaagtgattctcctgcctcagcctcccgagtagctgggactacaggcgtgtgccaccatgcccagctaatttgtgtgtgtgtatttttagtagagagggggtttcacgagtgttagccaagatggtctcaatctcctgacctcgtaatccgcccgcctcagcctcccaaagtgctggtattacaggcatgagccactgcgcccagccttaatcttgtctatatttttaaaaggatgtttgtcatattttacccaccatttattggtgtttgttaagaaatctgatataccattcagataccaactgtatccacctactgtcacagtcataatatacaacagttctattaaccatccctaaattccctcatgctttcttctttcattgtcaacctctcccctttaaccattcccagcctatgaaaaactactcaccaaattccatccatatagttttgctttgtcaagaatgtcatataaatagaatcaaaatatggcttttctcacttagcaaaatatatttaagatttatccatattgttgcatggatcaatttgtttctgttattgttgagtaatgttgcatgaatcaatactttgtttctgttattgctgagtaatgttccagtacctggaatggccaaagtttgctgattcattcgccttttgagggacatctggtagttccagtttggagcacttctgaataaagctgttataatctttgacatatagatgtttgtgtgagcataagtgtaaatactaatgtgactgctgtatcatatgctaaatgtatgtttaacattataagaaactaccacactcttttttaccatagttacagtgttttgcactctcagcaacagtatttgagaatttttgtgttctgtttcttgatctgtatttctaactgaaatattctttatcactatagactccttcccttatattggataattgttttttttttctttttctttttttatgagccagagtctcgctctgttgcccaggctggcttgctagtggtgagatcttggctcactgtaacctctgcctccctggttcaagtgattctcctgcctcagcctcccaagtaattgggattacaggcacctgccaccacacccagctgattttgtattttgttttttttgagatgaagtcttgcactgtcacccaggctggtgtgcagtggcatgatctcggctcactgcaacctccgcctcccaggttcaagcgattctcctgccttagcctcccgagtagctgggattacaggcacccgccaccatgcctggctaattttttgtatttttagtagagacgggttttcaccatgttggccaggttggtctcgaactcctgacctcaaatgatccacctgccttggcctcccaaagtgctgggattacaggcatgagccactgcgcctggcatgaataattgccttttttctctccaacattccatgagattatagaaccctttcattacgttatagacctgtagtagtgcctgggaactctaggatgtgttcttcccagaacacacagaattgtccttgaatagacaagtaaataagagaagacatgaggcaaggcatgaagaaacaaaggaaactgtgaagtaaggataagtaaaagcaacttagtatcctatttgaaagggatagagagagctaaagagcaattggagaggcatataggatcatagatttagtatggaggtgcttttgtttctatgtgtaaggaagttatagggaaaccacagatcactggtttctaggcatgtaccactagggtggtatgaagggttgattacagagaaacaggacaagggtatttaggagtgacagaagtatgacggtgggtggatacatgatttgtgtccttataagtcaaagtttcttttgttttttctcctgtttttcattcacctggtttttattgagtgctttcattacctagtttttattgagtgctagacatcacaaagaaaagttataaggtttcagtccttggataacattatacaaaatccaataaagatttaagtttgctatggcaagcagtcttgaatcaccataatccaaatttttgaaatttgagctgattcaaagatgattcagacttcagactctgtccagattggtctactgtttctcctttattcctcagtatagctctcagggttcccaacccaaagtataaagaattcatggcaggccctatcctccagttattgttgcccagccctgtgacacagtccaaaacactgtttagtttctccccctcttagctttttctagaatcataagacttctctaagtggaaatgtggacccagatgttgggcttatctctttgattttcatatttttcaatttttagccacccactctttattatgtaaacgctccagtggcttcactcaggtgccttttataatttgcttaatttgtataattgctatcatctagaaggttggtctaaattacctaaattaccagaaattaatgtttaagatttaggggctgataattaaattaagacctgaagaatgaggaagagtgtttgtatagtctcatccagagcagtccaaagaaatggaataggctctggctagcttttaattgaaaaaggtctgtgactttttcagagttgaaaggaagctagtttttctggcaaataaggagcgaagctgagaaggctcaacagatacataagcaaggagaagaccatggaaggggaaataagtcaaagtcattgaagagtttggattttatattaatatggaagctactaaaaagtattaagcagataaagaaaatcattatctgaatctgaatcagttgataggaaggattaaaattacagatctccaggatctttttctgattcactagcagttagtctggtgtaatgttggacagctataattttaacatgctccccaggtgattttgatccccaccaaggcttgagaactactcactttaaaattgttcttaatctcttcccttatcttctcaagtgagttttcattattctctaatctctcagatgcccctttcatatattaatatatgagatccttcttagctaattttttttaaaattctagataggaacattactgtaccatgaaatcagtgtagtggggtttgtctgcatgtgtatgagacagagaaattgaaaaaagtagaaatattgcagaatagaatagaaagcagggaagatactgttttatgaaactgtatatatatagtaggttgtgatgtgaaaggtaggtattatatgtcataataatcaatatttgaaacaaactcatgtatgtctgttatttcttatgggcattattttcctattatttgtcttttctatagaagttatatttctcaatttttttattctctcttatctttcagacttgccttcaaggtgtgcaagtaaggacttatctccagaaaagaacacttatgaaacagaattatcccaatgggaaatgagtgacagacttgaaaactgtgatcttgaagagtccaattccagggattatttggaagccaaaggcaagatggagaagcaacaagaaaatcagaaggaatatttcaggcaagggatgatcatatatgacaaaatgtccattttcaaccagcatacttacttatctcaacattcaagatgtcattctactgagaaaccctataaatgtaaggaatgtgggaaagccttcagacgagcctcacacctaacacaacatcaaagtattcatactggtgaaaaaccctatgaatgtaagcaatgcgggaaggcctttagtcgtgattcacaactcagtcttcatcagagacttcatactggtgagaaaccctatgcatgtaaggaatgtgggaaggcctttactcaaagctcacaacttattttacatcatagaattcatactggtgaaaaaccatataaatgtgaagaatgtgggaaagcctttattcgtagctcacaacttacccgacatcaaaaagttcatactggtgagaaaccttatgaatgtaaagaatgtgggaaggcctttactcagaattcacaacttacactacaccagagacttcatactggtgaaaagctctatgaatgtaaagaatgtaggaaggtctttactcagctctcacaacttattctgcataagagaattcataccggtgagaaaccctatgaatgtaaggaatgtggaaaagcttttatttgtggctcacagctttctcaacatcagaaaattcataatggggaaaaaccatatgaatgtaaggaatgtggaagggcctttattcggggctcactactgatgcaacatcagaggattcatactggtgaaaaaccctataaatgtgaagaatgtgggaaggcctttatccgtggctcacaacttactcaacaccagagaattcacaccaatgaaaagccctatgaatgtaaggaatgtggaaagatgtttagtcatggctcacaacttactcaacatcagagaatacacactggtgagaaaccctatcaatgtaaggaatgtggaaaagcgtttaatcgtggctcactccttacacgacaccagaggattcatactggtgagaaaccctatgaatgtaaagaatgtggaaaaacctttagtcgtggctcagaacttactcaacatgagcgaattcacacaggtgagaaaccctatgaatgtaaggaatgtgggaaatcttttattcgtggttcccagcttactcaacatcagagaatccatactggtgagaaaccttatgaatgtaaagaatgtagaatggcctttactcagagttcacatctttcccaacatcaaagacttcacactggtgagaaaccctatgtgtgtaatgaatgtggaaaggcctttgcgcgtggcttactacttatacaacatcagagaattcatactggtgagaaaccatatcaatgtaaggaatgtgggaaagcctttattcgtggttcacagttgactcaacatcagcgaattcacactggagaaaaaccctatgaatgcaaggagtgtggcaaggcctttagtcatggctctcagcttactctacatcagagaatccatactggtgagaagccctatgaatgcagagaatgtagaaaggcctttactcagagttcacatctttctcggcatcagagaattcatactggtgagaaaccatatcaatgtaaggaatgtgggaaggcctttactcgtggttcacagctaactcaacatcagagaattcatatcagtgagaaatcttttgaatataaggaatgtgggattgactttagtcatggctcacaagtttacatgtgaattgtctgattatttgagatcactatgaagaggttctctggttgttagcagcaaagaattctcacaaatgtgaatatgggcgcacatttgcctcataaagcacagcatcagataatttatgtgagagaaaatggtagtgtcattcatatagaaaaacatcattactggaaacctattaaacattagcaaattggagaatagttttaatatagtaaatgtaggaagccctttagccatattgaaaacaaatatctttttcaacgttatcttagctctactagttgatctttttgttatatgtatcatgatacttaacctctaccttggtttaatcattttaagatagacctaagtatattacctttattgtaagattcttggaagtattatgtaagttattacatgtaaaagctcttagaatggtgccttgaacgtagcataccacaaatattagctaccattttcactagtgttattttagagaatttgcatgagaggagagtacttatgagtataatgaatattgagaaatcttttatcaacacatccaagatgacttggttggggggcactgtatgccataatgaatgtgagaaagctgtcatttaaatctcatccattattgctataagaggaaattcatactgttaaaaaaaaaaaaacccagtggatataatcagtgtattattaaaaaaaaaaaaacccagtggatgtaatcagtgtattattgagcacagctgttagagaagtgggacaaggtgtgaagtgatttttaacgaagtctaagatccaaagtctaataaatctaggaattttttaaaaacttgaatgtattgcttttgaagtaaacaaaataactgatattacagactattttgcaatgaaaaatgatgagagtttgtgatacagactgcttttttcctaccctatatctattttctcttttttagtaacaaatttctgggctgaaaatctcagccttccttgcaggtcaacaagatagaagtgatatttatatgagtaggagatttacgaaatccatttttcctgtctttttttccgtgcctacaatgtggacatctaagctggagctccgttactctcatggggactttgagaatggtatctgggtgttatggatcatggagcagaaatacagaaggagtctgcaaccctgatgactttgtggaacagccatactagctctggtctgcttgcctcctgtttctctttaaataaaattaaacatcttatttgttgatgctattgtagttctgttattgacaataaaaattcttaaggatataaaattttgtacctggaagtgggatgctatgggtaaaagaaatctcaaatggggtattgacttagggccattgagaatgaggaactgcccaaattaagctaggaatttgaagattcttgttttaataggcaggatgttttgtcactgcctcccactcttacaagcatgctttatatcagttgatgctataatgttagaggaaatgctagaagtgattcagaatatgtgtgttgcatgtttcttgctgctttcagtaatgtcttgtgaacgagataaatttagagtagagctaggcagcccactagcagcaattgaaagcaatattgctttggtaagatgttatctatgatggcaagccctcaatcctccacccttaatccacttacagtgatttaatgtgacaacctgaacaagaaatcagaccactgccaatgcatacaaaggcagtctgctagtaaatatggttatgttttcctcacaggagcctattgttctaaaagtagtcagttattaggtacttaatatattccagccactatcttaggtgttttggatatttgtcagtgaacaattctaacaggaggagataatcatacacacagagtatgttagaatataagtgttatggggaaaaagtcattgaaaagacaatgggagggatatgatcatttagattgctttgtgaaatacagtgatcaaggtagaccatcaagaaggatagacttgagccaagacttgaaggagtgtggtgattccaggcagaggagagaggtcctacaatgggactacactgaagtgttttaggaaaagtggagaagttattgaagaacactgtgcaaagggatggttgctagagcagaactgagagataacagagagctatgtcttgccaagcgtgcaagccattggaaagatactttattttgagggaaacacaactgttgaaaaaaatcgatgaggaggttgtagtaactcagatgaaagaggatgtcatggcttcggaagaagaggtaacaatgggtatagtggttattggttgtattctaggtatatagtaaatgtgacagcaagcaagatttgtttaagggctagatgtaaaagagacaagtctagggtgactttaagtcaaagattttagtcttgagcatctgggaatacaatgttttcatcaaccaggatggagaaaacttcagttccagggttttaggggaagattgagagttcaactttgaacatgttgaatctgtagatgtcttttaagacacaaaatggcagtagtgagtaggcacttcatgtatgagatatacctaacttggtattatattactttagtaggtattgcccatatttatttaaatgattagggttttagtatagaaaaggtaaagaacagcaaggactgaaccacggagcactccaacattaagagttcaatgataaaagaacaacatgaaagaagctaaaggccaggtgcagtggctcacacctgtaatcccagcactttgggaggctgaggcgggcgtatcacgaggtcaggagattgagaccatcctggccaacacggtgaaaccccgtctctactaaaaaaaaatacaaaaaattagccaggcgtggtggcgggcgcctgtagtcccagctactcgggaggctgaggcaggagaatggcgtgaacccaggaggtggagcttgcagtgagccgagatcgcgccactgcactccagcctgggtgacagagtgacagtgtctcaaaaaagaaaaagaaaaaaagctaaggaggagaaccaataatagaggaaaaccaagaaactggaatcacaaaagccaaataaaagtgaattgaaggagaatcaacaggtatcagatagctttggcagactgattatacaacacgaggtttgaaacggccattgaatttatcagtatccgtgtcagtaactttgagaagagcacagggttttttttctttgtttatttctggtgtattgactttggagtgatagaagcaaaagcttgaaaagatagttgaggatgagtacagagaacactgcatgagggacacagcaagccacaggcacatctgttagcccagcctccaggtaacagtggaaaccctgcaggagagtcacatgcacaccctcagatcagtctgagggaaggatcccatgttgtatcctttgctcctgaagttttctcagcctggtcagcttcctcaacacctagaatccctggaacttctgcttgacctcctgaaggaaataggccagagcctaaactcaatgcacagctgcagagttcctggatccaatgctgcaaggacccatccagggcaaccacagaggtcattgagatgcaaattcactgctagtgccatgtacgtgtgcaattggaggatcagtttgaacttccagacaccaggctcacacagatgcaaagagaagggtggagctggtgccagaaaaagagctggctgctatcttcccttactcaggtctgaataaccacaactgggtctccttggacactctattaaaggacaaaattagggcttaaggtatgccctctggactcccctttaaatcagaggcaaacagcaaataatgcaaactctaaaatacccaaacaggaactataatggaaaaaaaatcacaagctgagggtcaaacagaaatacaggaataggttaaatagaagaactgcagacctgaaaaggcttgacgccagtgcagtcacaaagggaaaaaagtacatatcactcaagaaggaaaagaaaaatgtcgatgaaattaaacacaatgtttattagaacgacaagactggctataactggataatcatcttgtgaatagtgaagccatctgaataggcacagacagagttagcttgttggtaaaagtaatggaaacccacaactccataataatcacacctgcccaatcattaacaaataaatgtggagaaagcagcactatagaaatggatccccaagaatgttggccctgatgaactggaaaattatttttgttgataagattgagcctgacaaaaatctagacccatcagaaatagggaagacaaaaaaagacggcggtcatggaacaggctagagctcacccatgataaatcacagccaactaccatatggaactgggaacaaatgcaaaatgaagactatttcactagacaccacacatagacacacaaaaagacaaaattacattcacacacacagacatacaacagtgacacagaaacacacactcaggcagctcctgaggctgcagggttctgctgtctgtgatgaagtccctttaggaaaagagcagccttgagacacaggccagtcctcaaggtgacaagagggacaacttttggggagactcacccgcacactgtctaggcgggcctgaggctgggatcccgtggtgaatttctggggctccccttgatgtttcttcagccctccatgatgcctaggatcccaagaccatcctgttgaacccctggagaagacaaaccagagcccaaggccaatgaactgccacagagggctcctgctccggtggtggaggaaaagaggttgcacgggacagaaggcccgtcctagccatcctgtcctcaacccccacttcactggacttcttcctgagttcctggtggaggaagagcttcagggcaggagattggtactccttactcctctttggatctgattctggattggatgctgtgggcagaaattgggtcagatgggggtgaaaataaaatcagtgaggtgtggaaggggctgctggggcacatagacacctgagttccccagggaaggtatcagcgaaaaattcactgacccatgagcccacttcctcccttcaacctggccctagcagggccctgccctggcctcaaagcccaggggctcccgcttgtcaccactgtccaggaaatgtggaaatgaggtcaaatgcaaggtggggctaaggcaaccacacctggaactatcattccacaggggcagatgggttgggagtgtgtctctgaggcagctggggtaattccaggacagacagtagtgtccaggcatgctatcaaggggcactgaggacccccaagaaagcaaagaagaatcaaaggactcctgagactaaaaaagggcctgtgctggagtccaagccacctttggggattcctgccagaagacccacgaggtttctgcaaagtgtacccatgctcaactccaacacgggggacccctaacacagcctcacctgtatccagccaatccccagtcccttttattcaattaaaaaaataagtggcagccaaaggattcagtgctggaaagcagtctcatccaggaacaggggagttagatatccctcaagagtgagaaaatggaaacaaaatgcaagacaacctcaattagaaggcaaaggccagccatgggtgtctacctctcatcctgtgtgaatcacgcagccatctgattggatattgtgagcaattgtctttttgttttttgtttttgtttgttcgtttggtttttggtgaaagctatgaaaacctagagctccatgatcatcacacctgcccaataattaaagatgtgtggagaaggaaacactcatgaaatggaccccccagaatattgtccttggtgaactgggaaatattttttgttgataagattgagccagaccaaaaaaatctaggcccatcaaaaatatggaagacaataaaagatagagggcatagtaagagaacagaggcaatgttggggaaattactaccactgccatgtggatgcaggaatgagtgcaaaactcgtgacctagccagaaaggctgcagtttgatttaaagagattgttcacacgttattgtgttcttctcaatattgaatcatggtgagttttcatgcgactattaagggaaaggaagaatggagttacaagcatcttctttgacatctgactacaccactcctgctcatggaaaacgtgttcctgtgaggtttctgttgttggatgtggtatcgtcaccttattttagaaaagttggcctctccagagacaaggctatttttattcctcctggtgccaagcaggcccccacctcgcccaggccttaacaaaacacaagctggaaccacacagaaaacagattacacacagcccaagcagaaacacaaggagaggtaaaccaaaaggaagcctgacgaaagaaaccccctccagtgcacaaggcacatttgtcccactagataccacaaagagaagacacacacacaaacacatcccacacaaatacacacacagatatacaacacttacaaagtgctgaccagctacagccagtttggaccaataagtatcggtttatgccagttctaatttttcatcgctggttctgactggtttagaatggcttcaactggccagaacctatttagtgagactatagtgaatttgaccagcttggacctgttttgactggccaaaatcagtttatgccagttctggtctttgttggttttgaccagattagactcatttcaactggccacaactgttttatgcccagtaaaaatggcctcaacaggttttgaccactttcttatatcatctatatccttatgtaacccttgttattttttatgagagacttcttaccaaatgagggacacaagaaatattagaacttgagcacacaaacaagaaccactcataacctacaggagaattatcattattgtagatgaaagaggaccttccacattttcccttagaccttagaatctttttcagtctttcagtgtacaattttgagcacgtgtttttactggttttcacaatctggaattgttttatgccaattgtgatcagtctaagttggttctgaccagcttagaccagttccaactggtcaaaactggtttgtactgggtattactggccttgaccagcctgaaccagttttgattgggcaaaatcagttcatgcctattccaaatggtcttgccatttctgaccagtttagatcagttcctctggccaaaaatgactgatactggctctgactggctacaactggcttgaacaaataagcaccaatttatgccacttctaatttgtcatagctggttccaaccaacttagaatggtttcagctggctacaaccactttagaggggcttataattagccttgaccagcttgcacctgttttgaccagccaaaatctgcatatgccagttctgactactcttggccagttccgaaaggtttacactgatttcaactggccacgatcagtatagatggagtataacaagcatcaacaggttttgatcacttcaatgtagaatctatagcatcacataggccttgttagtttctttttgacatatttcttacaaaatcagagacaactagacacacaagcaagaaacactcaaaaccctttgaagaaagtttcactattgtagattaaaggagaccttcaatgttcccttagacttagaatactttccctctttcattgtgaaaccagcccaattttccaacaagctggatgtccataaaactgaagcttgagaaacttacatttgtacaatgaaatacatttgctgcttgttgaccaactcctttccccctgtttttattcggggctatataaacccttaactttagtcaaggaggagggatgaatttgaggtttggctgccatctcacaggctgatgtcacctgtgcaatagtaagcctgcctccctggcaatactcaactcactgattggctttttgtgtattgaccagtgggacccaaacataacccctggtgtttggtaacaattgtacaattttgagcactggttttgactagttttataagccagaaacttttttttttttttttagatggagtctcacactgttgcctaggcttgagtgcagtggcgcaatctcggctcactgcaacctctgcctcccaggttcaaacgattctccttgcctcagcctcccaagtagctggaattacaggtgcacaccaccatgcccagctaatttttttgtatttttagtagggaaggggtttcactatgttggccaggctggactcgaactcctgacctcttgattcacccgcctcagcctcccaaaatgctggaaatacaggcatgagccaccatgcctggccaagccagaaacattttatgccaggtgtgactagtcttggctggttccaatcagtttgggtcaatttcaactgactgcaaacggttaagactggctctgagtggctgcaaccagtttgaaatgaccataattggttaatgctggttctgactggtcatgtctggttccaaatggtgtagattggtttcaactgcccaaaatctgtgtagctagtgtaaaaggaaaataaatatcaggaccccaaaatcactaaaccaaaggaaaaagtcaagctgagaactgcatcaggcaaaccctgtctcccattttatttctaaatacgatagctacaaagataaaaaactattatacatacctccctcacaatttgtccacaagaaaatttcttgtgggcctcaagatctttaccctaaaacagtgctgttgaatttaaccctggtaaggtaacttgatagtttatcttcacaggtgtgagacaaagaacagaactcaatcatccctctgctcacctgagacaaatgcacatctgattgctttctctgccctattgtttatgtaaaaattcagattcactaagccagactaaggattcagtaaaaggctaatcagagactcaaaagaatgcaacaacttgcctcttagctacctatgacctggaagcccccacttcaagttgtcctgtatttccagactgaaccaatgtataccttacacatactgactgatgtctcatgtctccctaaaatgtataaaaccaagctgtgccccaaaaaccttgggcacatgtcatcaggacctcctgaggctgtgtcatggggtgtccttaaccttggcaaaataaactttctgaattgattgagacctgtctcagatactttgggttcacaacaggctacatctggccttgactggcttggactggttttgactggccacaattggtttatgtcagttttgactggtcttggccatttccaacaagtttacaccagtttcacctgaccacaaacggttcagactggctctgtctggctactatcagttttgacagactgaaattactttattctctttctgatttgttatggctagctttgaccagcttttaccagtttcaactggccatgactggtttggatgagctataactggcattaaccactttgagaaccccttgagactttttcatttcagctattgtactccagaatttttttgttttctatttctttattgatatatctattttgttcatacaatgtgttctagccagttactgcccaaagaagtctacagtcaatgctattcctatcaaaatactgtcatttttcacagaaataaaagaaactactctaaaatttatacagaatcaaaaaggagtccaaataaccaaagcaattctaaacagaaagaacaaagctggaggcatcacattacccaacttcaaactactataaagctacagtaaccaaaacagcatggcactggtaattaataaataaacaaataaaaaataaataaaacaaaacccacaaacccacatacaccaatggaacagaatagagaaccaagatataaagccacatacctacagtcatctgatctttggcaaagttgacaaaaataagcaaagcagaaagaattccctattcaataaacaatgctgggataactggctagacacatgccaaagaatgaaactggactctgacctttcaaaatataaaaaaattaatttgaggtggactaaagattaaatgtaagacctcaggccaggcgcagtggctcacagctgtaatccaagcactttgggaggccaaggcgggccaatcacctgaggtcaggtgttcgagaccagcctggccaacatggtgaaacgccgtctctactaaaaacacaaaaattagcctggcatgacggcaggcacctgtaatcccagctactcaggaggctgaggcaggagaatggtttgaatctaggatcagaagttgcagtgagccaagatcatgccaccgcactccagcctgggtgacagggtgagactctgtctcaaaaagaaaaaaaaaaaaaagacctcaaactataaaaatcttagaagaaaacctaggaaatacccttctcaacactggctttggcaaagaacttatggctaagtcctcaaaagcaactgcaacaaaaacaaaaattgacaaatgggacttaatgaaactaaagatcttctgcatagcaaaagaaattattaacaaagtaaacaggcaacctacagaatgagagaaaatattcacaaactatgcatctaacaaaggtctaacattcagaatctataaggaacctaaacaaatcaaacaaaaaacaaatcaatttaaaaacgggcaaaggacagacacttctcaaaagaagacatacgagtgtccaacaaacatgaaaaaatgctcagcattcctaatcatcagagaaatgcaaatcaaaaccacaatgagataccatctcacaccagtcagaatggagactgtaaaaaagtaacaggtgatgacaaggctgtggagaaaagggaatgcgtatacactgttagcgggaatgtaaatttagttcagccactgtggaaagcagtttggagatttctcaaagaacctagaactaccatttgacctgacaaccccattcctgggtatatacacaaaggaaaaatatatcgctctaccaaaagacacatgcactcatatgttcattgtgaatagcattgcagtgctattcacaatggcaaagacaaggaatcaacctaggtgcccatcaatggtgaactggataaagaaaacgtgttacatacataccatggaatactacacagccacaacaaagagtgaagtcatgtcattgatccagttggaggccattatcctaagctaattaacgtggcaaccgaaaaccaaataccacatgttttcacttataagtgggagctaagcattgagtgcacctggacataaagatgggaacaatagtcactggggatgactagaggagggagagagaaaggaggatgtgggctgaaaaacgacctgttgggtagtatacttactacctgagtgacaggatcatgtgtaccccaaacctcagcatcacgcaacatactcatctagcaaacgtgcacatgtacccactcaatccaaaataaaacttgggaaaaaaaagagaaaagcaactaaatgagtttttttgtagaaaacaaataattgggtcttatttttatatgcactttgacactttgacagtgtcttttagtgattgttgcatgtttctttttatgtacaatttgcatgcaacgaaatgcatacataaatcttaagtgtaccatttgctgttttgacaaatgcataacatgttgaatatttatgtttagcaaacctgttcagcatcaagctcctgccccaacacttcccagtctgcgcacggccactttgctggctgtaaccctttataaagtctccttgttttttaaatttaaatagtgtgtggccaggcatggtggctcatgcctgtaatcccagcatgtggggaggccagggtgggtggatcatttgaggtcaggagttcaagaccagcctggccaacatggtgaaaccccatctctattaaaaatacaaaaaaaattagccagacctggtggcatgcacctgtaatcccagctacttgggaagctgaggcaggagaatcacttgaacccgagaggtagaggttgcagtgagccgagatcacaccactgcactccagcctgggcgacagagtgagactccatctcaaaaaaaaaaaaaaaaacaaaacaaaacaacaactgtagtttttcttaaagttaacatatccatatcagtacttagtggcccatgaagggaaggtaaaaagggtagctccatttggtcctacctaattaatgtttcctctgtcttagcttgggctgccataacaaaattgcatatactcagtggcttaacaaaatggaacacaaatgaattttcttaacaacaaaaattaattttctcacagttctggaagctggaaagtccaaggtaaggtgccagcatggtccgcttttggtgagggctgccttcttgctacgtcctcatacggcttttcctaggtgcaggagacagagagagcgagcgagcctctcttcctatttttgtaagaccaccaattctaccagatgaggatcccacccttatgaacttaattaacttcaattacctcctaaaagctctatctccaaaatagccacattgagggttagagcttcaacctctgaattttggggggacacagtttagttcatagcaccctccaaaggatactcctctcctttgacatgtgtgatgttatccacaaccatcaaggggtggatagcgttcctgattataaaacttcagcatccaaaagcttggagctacccttggttctggaagcttccttacttttactttgaagttttcagttcccattgggagagaccctcatcccaactgtagatgaatcatttttcttcttggccaagctggagactgcatggaatcacttttattcttctgcaatatcattccaaagtcaggagagacagctttaaattacagcacctggctgagacctgggaagcttgccccatattcccgacattcctcactgtggccttccattgagtgactgcagctgactgccaattcccagaaccataagcttatgtttacaatcaaggactcttccacctgccttacacacaaactcagcagactcattttaattttttttagttacttttttttttttttagatggagtctcgctgtgtagcccaggctggagtgcagtggtgggatctcagctaactgcaacctctacctcccaagttcaagcaattctcctgcctcagcctcccgagtaactaggactacagtgtgtgccaccacgcccagctaattttgtgtgtgtgtgtgtgtgtgtgtgtgtgtgtgtgtatttttagtagagacggggtttcaccgtgttagccaggatggcttcaatctcctgatctcgtgatctgcccgcctcggcctcccagagggctgggattataggcatgagccaccgcacccagcccattttaatttattttacctcctacaggtggtcctgacacatacacactgaacaaacatgcgtgtgacatatgaaccatgttcactttggggtagagacacaacatttaaatttattacaattaggtcctattatatcaaaaggtcttttcaggtcaggaagccacacaagtgcgcagtgtgtgtatactagccaggaccagtctgtgctcagtggtcttttcatcaggagaaagttactgaagttagtctcttgtccagtcaaagctatagttatagctggtggaatagtgggtggaggtcagtcatcatctggtggagctgcaaattgttttaatattgtttatgttgaggccagtgcttgtttagctgccagagaggaaaaaaaaaaaaaccttgtggcagttagaggcagttagaacatactttattctttttatttatttatttatttatttttgagatggactttcacctcaccataacctctgccttctgggttcaagcaattctcctgcctcagcctcctgagtagctgggattacaggcatgcgccaccacacccagctaattttgtatttttaatagagatggggtttcaccatattggtcaggctggtctcgaactcctgacctcaggtgatcctcccgccttggcctcccaaagtactgggattacaggcgtgagccactgtgcctggccagaaaagaatttattccttaagtgtagggggatgtgacctatcccttgcctggcatggctttgcgtccagcttatgtcttattgccacaaagcatctgttctgtcaatcttatgatctctgttttaacattcatgttggtcagttgttatatttaaaccacaaaagagaggggtataatgaggcctgtctaaccttccatcctgtcatggctgggaactaagtatttaagagttttctgggggctgggcgcggtggctttacacctgtaatcccagcactttgggaggccgaggcagccagatcaccagaggtcgggagttcaagaccagcctgaccaacatggagaaaccccgtctctactaaaaatacaaaattagctgggcgtggtggcgcatgcctgtagtcccagctactcgggaggctgaggcaggagaatcccttgaacctcggaggcagaggtttcagtgagccgagattgtgccactgcactccagcctgggcaacgagcaaaactctgtctcaaaaacaaaaaaaaggagttttctggggtccccttggccacaagggggtccattcagttggggagtggcttaggattttaagtttataaatcttagggaaagactcccaggagaataagtgaagacataaagccatatcatggaaagatttaagtgttcatcactgttataataggcacagttataatattaaaataatgataataatgatgatgttaacaatgtcctcctcctatggggcggggatgcaggaatagccagccttctcaggagaagtattatggctacactattactactgtattactttataactacagcatgattacactataaccaagcctgggagtgatcacactaatgatggcctttcaggtgcagcactgcataggggttaatggaatggactctttagttggccagcccaggtttgaatttccctgtgctttttaaaagttttgtgatcttggaaaattcctttattcctctgtgacacattctttgtgtgggaaacgagtataataattgtgctcatctcaagcattaggaggactgaatgaacctagaacatggcctggtgcacattaaacacttaactaaaatttgctgtcatcattattgtcatcacaatcagcactgtgtactgggtaccacatcatttatgcttcacaaataccttataatgtgcggactatttccctctgggttacgagattgtcattagtcaacagtggtatcaattgcaatgataatggtaatataaatgcaaatgaccacaatgtcagtgtggtagccagcctccaagattgccctcaatcaatcttatctcctggtattcaaactccatagagtcttctttcacgataaatagactgaccactgtaaccaatactttcactatgtggtgaacacactcaagtattcttatggtgggttccatgtggtgagaaactgaggcctttcaccttctgctcatagtcacgtgagcttagaatcagatccaattagccccagttagccttcagatgactgcaattctagccaacatcctgattgcaacctcatgagagttcctgagccagaaccacctagctaaactgtgcctagatttccagtcctcagagagtatgtaggagaataagtgtttattattatgtcacgccactaagttttgagtaatatgttacacatagcgatagataattaatatggttgtcctagtctgtttgggatgctataacaaaatgcctaggctgggggatttattaagaagccaaatttattgctcacagttctgatggctgaaaagtccaagatcaagatgccaacacattcagcgtctggtgagagttgtctgcttctcagatggtgactacttgccgtgttctcgcatggcagaaaggaaaagaaactcccttggccctcttttgtaaggccatgaattgcattcctgaaagcaaagccctcatgacctaatcacctaccaaagactccatctcttaatattatctcagtgggaaactgatttcaatatgtaaatgtggtgggggaaggcacaaatttagaccattgcagcagtcgacgctgtattgtaaatgtgcccattttccgcaatataatagaacacaccatgggttttcaggattggcatttattataggcacaaacttaatataactcaaatgattgtactaatgtgcttcttatattgtcctatttcacaaatgtaaacagagagcacaattttttgttttaatagcagcattccttgttataataaatattaaaataacaccataataaaatcactaaggatgtaacctaattgtgctgatttcacagagggtggaaaacatcagcccaggggtgggactactgtgtttatataatacaaacacctgaaggtggcagaaactagcagagacagaggatttcttagcatcagaattgatatgttgttatttatgatatcttaataatttagaggcatataataatgacaaggattctgatatttgttataaagtataattgtgttgattatatttaaaaccattaatagaaacaatataattatagaattaagtaaaactgtaagtggtatgctatggcatggtgtacggtatggtacggtatgaggaatgtggagtagagtgtggtggggaggtgtaggatataccataaatagtcacactgggttgggcgaggtggctcaggcctgtaatcccaatgctttgggtggccgaggtgggcaaatcgtgaggtcaggagattgagaccatcctggccaacatggtgaaaccccatctctactaaaaatacaaaaaattagctgggtgtggtggtgggtgcctgtaatcgcagctactcggaggctgaggcaggagaatcacttgaacccgggaggcagaggttgcagtgagccaagatcacaccactgcactccagcctggcaacagagtgagactccatctcaaaaaaaataaaaataaaaaatagtcacattggcactagtagcccatttgagagctgagggtggagggtgtgattcatcctggcattatgggaagtgtccatgacaaccttggctttaagctgactttggccacggggtcaatgtctgccacactgcatcacatccattatccaacaaggtgcctgagccccagaaccctcagccctgccacattcctcttgctcctggggttctatattttccagtggctgctccagtggaggaggtggggcaggtgacactgacaatggggtgcaggatagaaagtgctaggctagatgctgatgggagtggccccctgcctatggatcccccactcctgcccctttccccctctatgtgacctgccactgtgaccaggaggaggctaagttagatcttgtaaacagtgtggaatgtatgtaggtaggatactcagtttggtactgccctgacatggagttagagctgggtgtgctggaccatggtgggaggaggcattaaatcttgaattagaggacccaaacccaccccaccaacttccccacacatgttaccaatctgtgcggggcatctggtcaacctcgatattattgctattattcattcatccatttaacaagcttgtactgagcatctgctttgagctggcaccgtgctgggcgcctggtatacagcagaaacaggacagacaaagtctggttctcatgaggctgatggtccagtggggaagagggatgagaaaccaaaaaaaggaatattgaatcaggtcagatagtaatagtatttgcaatgcaaatatcatacaaaataagggagcagcaagtgagctctacagatgtgttacttcaatggcaggataagatggggatggaggcactgcaaaggtggaagaggaaagcaagatgcacgggcactggagaagcagagcactctcagaacagtcggtgcaaaggcccaaagccagagaaaagatccttgatgttaaaacagccagaattgagatgcctgacaaataaaaatgttgactaactccaactgcagactctctggcctcttttattgtagttatatctttacactacaaacattaaatgcaactacgtgaaagtagaaataaccaaaatattatgtgaaagtttgatatgtaaaatattaaaattaggtaatcatataaaataaaacatatactataaaacaggtactattatataaaatacaaactattttattgtcacaaggaatatacagtaataaatattacaatatgctatataacatactgtagacacaattttctatagtatgtaatgacaggcacatataaaattaaaatatataaatctagtttttacacttataaatcttttatcaaatgtaattcaagttatcacatggtttacctaaaatacaacagcacttttgagattcatccatgttgtagtaagtgtcaataaatcatttctttatgtctgagcagccctccatagtattggtgtacacaatttgtttaatcactcatccactgatgtacatttgtgttacttcctaatttgggcaattatacaattgctgtgaacatctgagtataggttttcatgtaaacagaatttttctttcatctagggtaaatacctaagtgtggagttgctgagtcatatgataaatgtatggttaatagtataagaagctgccaaacttttgtgcatagtggacagaccgttttacaatcctacaagcaatgcatgaaaatttccattggtctgtattcttgccaatttatggcacgttttcatttttagccattctaaaagccattctatagtagtatctcattgtggtttgatttacattttcctgataattaaagatgttgagcatcttttcatcaccttattttccatttgtttttcatagaaccatatggatgaatctcagatacatcacattaaatgaaagcactccgactcaaaaggagatatacatacacgtacaaaacacacacacacacacacacacacacaaggactccacttatacaatattatggaaaaggcagaactatagagacggaaacagactggtgattgccaagggctgggagtgggaaaagggactaaaaagggataggaaagaagttagggaagtgaggggcctgttcttcatcttgattgtggtgttgattgcatgattagatacaactgtcaaaactcagaactctacactaaaaagtgtgactattactgaatgtaaattatacctcaataaatataactttaaaaatatttcagttatgtccacacaaaaagcctgcacagatatttataacagctttcctcataattgccaaaaggaagcatccaacagtccttcagtaggtgaataaataaacatccagacgatggaacataatttggctctaaaaagaaatgcattatcaagccatgaaaagacatggaggaaactgaaatccacattactaagtgaaagaagtcaatttgaaaaggctacacactgtataatttcaactatatgatataaaagatcaaaggtaaaactatggagacagaaaaaatgttgccaggattagaggagatgaagggatgacaggcagaacacagaggatttttagggcagtgaaactactctgtgtataacagtggaaacatgccatgatccacttgctccaacaagcagaaagtacaagacacattctatggtgttacaccaaggatgaaccctaatataacctatagacttggggtggtaatgagtgtcagtggaggttcaccaattgtaacaaatatactactctgagaggaatgctgataatgtgggaggctatgcatatgtggattaggggatatatgggaaacctctgtaatttctacccaattttgctttgaacctaaaactactctaaaaaataaagccttccgtatatacgggtatatgcatatacatatacgtaagtattataatattgttacaataaatatataagagaaataatcaaaagtcatttacaataaattgtttcccttcatgaggcttgggcatacagaggatagtcagatgcttatgttgactgatgactaatattaacaggatgctgtcattgggccctgctggcttggatcccatccatcatgtgacccaaaaaaagtcacttcattctcccataatcccattttacaagtgagaaaattgaggcccagaggaggtttctgggcaggctgagggtccctaagtggatcagtgttggcaccagaatttgaaccaacatagacagctttcactgttctgctcacaccatactcatgtagtagacaggaagcccagcttgtggtctcctgagatctccagatcatccctggcccaccctgggtccatcattccattgtgccttggggggaactcagaggaaaaggtctatgaggctgggacctcatcctcatcaccatcttccagggatcatgaccatgcaaacatggagatgcaatcttgggggaagtacagtagccaagggtgactaaggaaccgcatgaagcaatgtgggaaattgggaatcagcagacattgggttaacgggacaatggggagccaagagataccatcaaaatttaatggaggggtcagacactgtgttagtgattaatgggcatcaacagacattgggctagtttttgttttttttttttttaactggggtcctagaaagaaggggacagaagaggctccaaaatacagttgggaaatgtggacattatggttcattgtaagtcaccgccattgcctgaggggaaggaagaaagttaacagcatccaccgtattgagggcattcccacatgctgtgttagggacagttagatactgctaggtgagtaacgggagataattgttcatcatcgtgagggaaaaatcaataaggaggatcacaagacatcctgctagaggtgtaataaaagtatcaggagatagaaaccattgtattgcagggggcacaccactgtcccctattctgagggttgtaataagtggtcatcacacagaatggagagtggaccttactagacattgtcacaagtgggaagaggtaacagacaccatgctggagtgaggtgattgtaaaagaggtaatgaggagatctccagaaactgtttccggaattgatgaagtgtgacacacataagagtaaggtaaaacaggaaaaatggccaggcgtcatggccctttccagccctaaacatatggttgtgttggttttcatataagttattaatctgttacatgaaagttacatccttaaggaagccagatactaagcttcaagtcagtgatgagtacgaaaaaaaaaaaaaggcaactgagttggaagaactatgacagcagaagggagatttaagttgtcccagatgaccataaaattcttacctcggaagctttcttgaaggtgatgggagttcacaagacacggtgctgggggtcaaaacacaaagtgctgagggcccgtgaggctgagagacagtcatggtagataatgaggggggtgcaagtcttggtagatgacagtggggactcaacatacattctgaggtttacgtctgtatacataaaggttttttctttttttttttgtagcatctctttcttgatagaaatactgaatgagggttggatatgaccaactgtggtagattcgaatgagaaagaaaaacacccaggagtctgttacacaatgtgttccacaacgaacaactcacataacttaggattcatcactatcaaaataactacgtattatgttgttttatcattcaatttgttggcactatacctaatccacagtaaacaggattatcgttaacttaatacgatctttcttaggaagaatttggtaacagtattctattgtagttttcatgagaaggcttttcctattcaccaaattgactcggttccttgtcagtatgaataatgacccaaggtttactggggatggtgacaatgtaggaagggtccctcgcctcattcagtgccttctcagaggccctctccagaacagccatgtgtgacattctgctgtggtcatttctatttacaataatatacatatttttctgctgcatgcgtgcaacagtgtacaatcagacccaaccctcaggggggttttctcacactgtttctctcaagcgtggctgctctgatggacgctgaacactgatttctgaacgaagcctttcccacagatgccacacttgtagggtttgtctccagtgtgtgttgtctgatgtttattcaaattggacctgtcagtaaaggccttcccacactcagcacacacgtaaggcttctctccagtgtgaattcgctgatgcacttggagctgtgattttttagtgaaagacttcccacagtcactgcactcataaggtttctctccagtatgaattctgtgatgtgtaatcaactctgacttctgtcgaaaggtcttcccacattcagaacaaatgtagggcttttctccggtatgagttttctggtgcttactgagatttgacctgccactaaaggccttcccgcactcggcacacacatagggtttctctcctgtgtgaactggctgatgcaccaggagctgagacttggaggtaaaggacttcccacagtcactgcattcataaggcttctctccagtatgaattctttgatgagtaataaagtttgacttgcggatgaaagctcttccacactcagtgcatacatagggtttctctcctgtatgaattttctgatgaacaatgagtattgatttctggttgaaggctttcccacattcgtggcattcatactgtctctctccagtgtgaattttctgatgtatattgaggtgtgacttctgagtgaaggcttttccacaagtattgcattcataaggcttctccccagtatggattctctgatgtgtaatcaagtctgacctctgggtgaaggcctttccacatttggaacatatataagatttctctcctgtatgagttttctgatgtgtaatgagatttgaccggttggtgaatgccttcccacatttattgcacatatagggcttttctcctgtgtgaattcgtttatgaacatggagttgcgacttggaggtaaacaatttcccacagtgaccacatttatgaggtttctctccagtatgaattatttgatgtgcaatcaagtgtgccttctgaatgaaggccagtccacatttcatgcatatatacgatttttctcctgtatgaattctctgatgcactgtgagtgctgacttctgagtgaaggctttcccacagtcactgcattcataaggtttctctccagtgtgaattctctgatgaataatcaactctgacctgtaggtaaaggccttcccacactcagtacatatggaagatttctctctactttgaactttcttatgtgtaacgaggttggaattattgctgaagaccttcccatattcggtacatatatagggcttcactcttgtgtgaacacgttgatgtacctgaagttgtgacttggaaatgaaggatttgccacagttactgcactcatatggtttttctccagtatgaattcttcggtgtgcaatcaaatgggtcttctggatgaaggcctgtccgcattcaatacagatgtaggatctctcgcctgtatggattttctgatgcatcttgagtgtggacttttgtgtgaatgctttgccacagtcagtgcattcatggtgtctctctccagtatgaattttctcatgtatactgagatctgagttataagagaagcctttcccacactggctgcattcatagagtttctctccggtatgaattctctgatgcctgaagagggacgacacttgaaaaaaggattttccacattcattgcatttaaagggtttctctctcatatgggttttctggtgtataataaattctggcttctgtacaaaagccttcccacattcaatgcatacatagagcttttctcctgcaagaactttcaggtgtactttgagctgtgacttctgggtgaatatcttttcaaatttggcgcattcataagctttctccccaggatacattttttgaggttgagaggatacttgtttataactgaggatttttctacattgattatggtcccataatttctctcctgttggaatacactcatggttactataggaagacattttatcatttggtaatctttttaacattctttgaaggattatttttattatgactgtataaatctaaattatgctttaaaccatttccaaatgaggcatattgatggggtcttttgggaggagaaatgatgtttgggttcacatgaattatttttctactatccttatagtcatattgcctctttgttgtcaatattttcttgatgaaagcaacatcattttgatatttattttctctgctgatagctctctatttgtcaccaatctgtcacaattattctagaataaaatagaatctcacatcactttcatcatgaccttttctttcaatttggaaagaaacctcttcagagattccgtgctataaggtctggaatctaaactccgctcaaatgagaaacaggtgattttagttcaaagaacagctagcagaggctagggggtatggtacaaatgactcatccaggctgaacacagagaaaagggtgagggtgagtaacgtgaagaggaaggcagtaacaatgttgataggaaatgttctggaaaacaattcagcagttagaggaaataaactaaatgaacagataacaccatggacagatgtggaaaaagtaaggcaaaaaacactatatataccacagcatcattcatataaactaatgatccaaactcttaattcacttacaacatgcatgaaataaaaaatgtttccatcatataaaacagtagcttatgacaggcagaaaaatgggtgtgggggaaagagaaaaaggaataaatcaaaacataaataagagagaatcctgacccagactcatgatgatagtgtgtcttaaactgaagactatgattaaactcaaacctcatcaggtaaactataaaaataaagcaatcaaaaacaacaacaaaaacgaaccctggtcaatgtggaatcactcaagcaacatcaagaaaaaaggtcaggaagggtgattaattatgttaaagacagcagaaagataatcccaaagattaagtaacagtgacccccaaagtcatcagtttatccaggcatgaaggactgggaagaagtaagaaatttcatggccactcctctgcagaaaacaaaaagagagggtgattggacagaaagctctgaggcatctcacagtaaaaaaaaaaaaagaaagaaaaaaaagaaaaaagaaaagaaataaaagtgactagcaggagtgggagtgggtgacacagagtaactttgaaagaaagcagatccgtgaatgcgtgaaggttaaagaaagactctaggactatggggaatgtaggggaaaagaagaatgttagagaaaatgagcataaccaagaaagaaagatctttttttttttttttttttttgagacggagtctcgctctgtcgcccaggctggagtgcagtggcgcgatctcggctcactgcaagctctgcctcccgggttcatgccattctcctgcctcagcctcccgagtagctgggactacaggcatccaccacggcgcccggctaattttttgtatttttaggagagacggggtttcaccgtggtcccgatctcctgacctcatgatctgcccgcctcggcctcccaaagtgctgggattacaggtgtgagccaccgcgcccggccaagaaagatctttaatgagggagactggcacatgattcagaatccacgaagccaaagaagaacacagaagtgacaaaggtcggccaggcgcagtagctcatgcctgtaatcccagcactttgggaggcctagacgggtggatcacttgaggtcaggtgttagagaccagcctggccaacatggtgaaaccctgcctctactaaaagtacaaagattagctgggcatggtggctggcaaacacctgtaatcccagttacttggatggctgaggcacgagaattgcttgaacccaggaggcgggggttgtagtgagctgggatcatgccactgcactccagcctgggcaacacagccccggctgcgacccaggctgtgacaaaaaataaatgacaaaggtcatccagggagaatgcatttagtgatctgagaggccaagggggcatcaagcaatacaaaaacattcagaactttccagaaaaagcatcttaatagtattccaagggtgttggtgtttctcaagacagctgagatttcctcccatctcccatctaccggattcacactcgcttcactcacctgggcagctctgacgtggcctctcaccctgcagtgcccatggttcctttccttgctccaacatgaccacctctgcttcaggaacttgatatcctgttcatgggaaatgataaaggtctgggtccagctaattgtgtttcagggcccaaccaataatctcttattctttgatgaggattttttcttcagaaaagtaaccataacttttcagggtaaaattctgagtgccctaaacaaataaagaatcctagacaaatcaagaacaaaatcatcacctatttaagatgcggacagcattcaccaactgagaatgaaaacactctcagtgaggcctcctttcagataccaaggtgactgtgcttacctactgagagcaggtggctgtaggtctccagcatcacatcccggtacaggtttctctgagaagggtccaggtgccgccattcctctctgctgaaatcgatagccacatccctgaaggacactgatccctgtaagggcaaattcttgttcaatgtgcacagtcagcttagagggttggagagactatatttaggaatatggaatacaggtcttgttgttttaaatttacattctctttttaaaaactcactcccatttctctaatactttattatgaaaattttcaaacataccgacaatttaaaataattatgcagtaagaaatgtatacctaccacctaggatcaatcattaacactttacttgctttatcatacatctaagccattcttttatctatccatcttgcttctttgtacatttcaaagtaagttgcagatgacaccacacttcttcctaatacttcattttttttttcttccgaaacagagtctcgctctgttgtccaggctggagtacaatggtatgatcttggctcactgcaacctccgcctcccaggttcaagagagtctcctacctcagcctcccgagtagctgggattataggaatgcaccaccatgcccggctaatttttgtatttatagtagacacggggttttgccatgttggccaggctggtcttgaactgctgacctcaggtgatccacccgctttggcctcccaaagtgctgggattatgcgtgagccaccgcgcctggcctctcttaatacttcaaaatgcaaatcatgaactagggtgtaaaacgtatcaaccttttgtaagtaacatttacatacaattaaatgcaccaatctttaatttaccatttaaagttttgacaactgtgtacacctgtataatccagaaatttcgaagaaacattttatatatatgcatattaaatatttagttttacatattttgtggaacacagaaatcccatcaagaatttctgctatttgttctgtactatagtcagccaattactcatttttcaaaactggcaattgaaataagctgtgttttagtttcctagcaactggatgaatgacctgcgatatgctttctgatcaatttaggacgagcccttatgctagccctgggaacacagaaataattatgtgtccaatcttctagcaacttaaaagacttggaaaataaatcagactgaagttttttaaaaaagaagacataacaaattcattaaggtgttgaaaagtagatgccttatggtggaacacactgagggcccaaaggaacaaaaagtacattttacttgagggagtaagttgacattccgtagagttgaggaatttaacttggaagatacaaagtgtaacccagaatatggggtgagggggacaatgcccagaaaagacaagaataaaaggtgtagagatagaaaaatacaccatgagtttagggaacagcaaacaggtttatataaatggagagaagtctgtctgatgtgtcagaaaagcagtataggaaaaacagtttggtcaaagtatggaatttttactttcagtaatggtaattaaggtaatcagatttatatgtaaattttttttaagttctgtattacacaggataaccaaacagctggtgaggaaaagttcttttttttttttttttttagacaaaagtctcactctgtcgcccaggctagagtgcagtggtgcgatctcggctcaccgcaacctccacctcccggattcaagccgttctctgcctcagactcccgagtagctgggattacaggcgcacgccaccacaccaggctaattttcgtatttttaatagagacagggtttcaccatgctggccaggatggtctcgatctcctgacctcacgatctacctgcctcggcctcccaaagtggtgggattactggcatgagctactttacctggttggaaaagttttttatagaatgattctagctaataaataaagaagttaggataaaattaaaataccaccatgtataactactaatgaaataacagatttagacaataatcattaatggctgttggaatgtttcagttgaaaggctgaagggaagcgtacaatggatagatcagctagtaacatcagcatccacaaaccagctctcatgtgcctgctgacatggcatagtaattaatttcattacactacttatgaagtattcttgccaaaaaataaaattcaaacccctatctcatcaagtctccagatctaacaagccattcacaggagtgggaaggagagtgaaacgtactgaacaatatgaagaccaagacatcagctaaattcagaaggtagcaaatggcccacttcttcaaaaaattacaagagaatggacatggaagggaatattttctttattaatagagactttagagccatactaaccaaaggcaacttgtggactttcactaattaaaatgaaccaatcttaaaaaaatatttatgacaatttagagaaatgcaaatggtgggtattagatgatatcaaggaattactgttattttgttgtgtgacattagcttactggttatgctaaacacaaaggaaaaagggaattcatatctctccgagatacatatcaaggtatttttacacaaaacatggtgtttgagatttgctttaaaataatctagctgctgaatgggaggtggtttcagataaagtaagaatggcagaatgggccaggtgtggtggctcacacctgtaatcccagcactttgggaggccgaggcaagtggattgcttgaggttgggggtttgagaccagcctggccaacatggagaaatctcatctctaccaaaaaatacaaaaattagctgggtgtggtggcacacacctataatcccagctacccaggaggctgaggcacgagaatcacttgaacccaggaggtggagattacagtgagctgaggtcgtgccactgcactccagccgaggcaacagagtgagactccatctcaaaaaaaaaaaaaaaaaaaaggcagaatgttgatgacgactgaaactgggtgacagggacaatcggtgaaagggatctttatactattatctttacttttgcatatatttaaattttttcataataaaatgctttttgaaaacaaaatacatgatcctccaaattaaaaaatctaacttggaattgcacaatgaaaggaatgcctattaccacatggagctgtatacatttaaagaaagtatgctagggacttgaatacccctccctcaccttagcaatttatcaaaatactagacaggacatcatcaaggttatagaaaaggcagctgcaacaaacaacagcagaatgcacattcttttcaagcacccatagaaaagtgagcatgacaaccataccctaggctgtgaaacaaacctcaacaagtttacaagaattacaacaatacaaagtatgttccacaagggaatcaaacaaaaattaataacagaaacaaaacagacaaaatctccaagcaaattaaaaaataacaaacaaaaacaacctaaaaaacccacaaaatatttgaaaattaacagcactcttctttaatgacccacaggtcaaacaagatatcgccaaaataatatttaaaatacacagagttctatgtatagacagtaaaaatacaacctatcaaaatctgtgggatgcaggtaaagcaaggctgagagggaaatttatagtactaaaggattacattagaaaagggaaaaagctacaaatcaataatgtaagcttgtacctcaaaaaactagaaaaagaggccagacatggtggctcactcctataatcccaacactttgggaggccaaagtgggaggattgcttgagcccaggagttcgagatcagcctgggaaacagggcaaaaccccatctccatcaataatacaaaaattagccaggtgtggtagtgtgcacttcccaaatagtggtcccagctatttgggaggctgaggcaggagaatcacttgagcctgggaaggcagaggatgtagtgagctgagatggcaccactgcactccagcctgggcaacagagccagaacctgtctcaaaaataaataaataaataaataaataaataaataaataaataaataactagaaaaagaagagcaaaagaactcaaaagcaagcagaaggaactaaataataaaaagtagaaatcaacaaaactgaaaacaaaagatagagagaaaaatcactgtaacacaatccagttattagagaacaaaataataaaaccgataaattcactgattggtctattagtcaaccagactggcaaagataaaaagacaccaatattaggaataaaacagtaaatatcattatagatgcagcagccatttaaaatacaatgagaaaaataaacactccaagctaataaattcaataacttagaaaaaaataagccaattcctcaaacatcacaaactaccaaaactcaaacctttgaaaatggataagataaaccatcttatgaccattaaattaatttaaattaataatttaaaagctcccgaaaaagaaacctctaggctagatagttctaccagagaattctttttttcttcttctttttaattttttttgtgagacacgatcttgctctgtcgtccaggctgaagagcagtggcgtgatcatcggtcactgcagcctcgaactcctgggctcaagcgatcctcctgcctcagcctcctgagtagctgccactacagacacatatcaccatacccagcttttaccaaagaattctatcgaacttacaaagaagaatgtgtcatttttacataatctcttccagaaaataaaagaggagaaacacttccaaactaatatttttaagcccagtattactccaatgtcaaaatcagacaaacacagtaacaaaaaaaaaaactacaggccaatatctctcatgaatttaaatgcaaacattcccaacaaaatgtcagcaaactgaattcaagaatcactaaaaagaatcacgtaccacaataaactggaatttatgggggaactctttgtactatattttctaactccttatgaatctgtaataatttcaaaataaaaaactgaaatatacatattacttaagaaagattattttcaaaacatacataacatttgggaatggacaagactggaagatcagagactcattgcacaattgatgagagagaatataaattgtagttgagcctgaacaacacaggtttgaactacgcaagtccacagatacatgaatttttttcaataaaagttacatatagtgtgcatgcctctcctgcctccccttccaccttctcctcctcttccgcctctgccacccgagccagcaaaaccaaactctccttttcctcctactcctcagtcagctcagatgtgaagatgacaaagataaaaacctttacgatgatccactttcacttaatgaatattgaatacaaatatcttccttttgattttcttaataacatttttttctctagcttactttattctaagaaaaaaaaagtcatgtatgagcaggtctctgaattcaggagagtgcacgagcacacaggaagaaattggagacagaaatgtattaaagatacttgtgatcattaatatctgaaagtatgattcttttttttgttttttgagatggagtttcactctgttacccaggctgcagtgcagtggcgcaatctcggctcactgcaacccctgcctcccaggttcaagcgattctcctgcctcagcttcccaagtagctgggactacaggcaccggccaacatgcctggctagtttttctatttttagttgagatggggtttcaccatgttggcaaggctggtcttgaactcctgacctcgggtcatctgcccatctgggcctcccaaagtgatgggattacaggcgtgagccaccacgcccggcctaaaagtatgattcttaaaagctacttttttaatttattcatttaattgtgttcggagattacaatttgtttctttgtgatgtgtgttgattctgtttatgaggcttacaatatcttcatttcttaaaaggaaggcttatacactgttggtgggagtgtaaattagttcaggccttatggaagacagtgtggcgattcctcaaagacctaaagacagaaataccatttgacccagcaatcctgttactggatatatacccaaaggaatataaatcattgtattataaagacacatacccacatatgttctctgcagcagtattcacaatagcaaagacatggaatcaatctaaatgcccatcagtgataaactggataaagaaaatgtggtgtctatatatacaccatggaatactatgcagccataaaagagactgagatcatgtcttttgcaggaacatggatggagctggaggtgataatccttagcaaactaatgcaggaacggaaaccaaataccacacgttctaacttataagtgggagctaaatgatgagaacacagggacacaaagaagggaacaacacacactggggccttttggaaagtggagggtgaaaggagggaaaggatcagaaaaaataactaatgggtactaggcttaatacctgggtgataaaagtctatacaataaacccccatgacacaagttaacctatataacaaacctgcccttgtacctataaacttaaaccaaaaaaaaagttccctatatacctgaaatgaagacgcatgctctagttttctcttcatcacacacttgcatattcatgccctacacacactgaacccccagcccccaaaactaatgtcatcaaaaaatttaatggggaatcaagacaatgtcatgttaggctagaatggagttttgacacctcaccaaatgatcttatacaaacagtttgtcaggaagaaatctcctcattcaaagacaataaacatctcctgatgtacaaagatgctatgagtaaaaggatgaaaaaaaaaagagaggagattaagaagaatacactagaaataaattgacatacaacagaagaaatcataacctccatgaattcaaggaatttactaaaacaattaactgcttagggaaaaacagattaagaatatagtgatataaatttctgaaaaataaattaacagaactcagtaaaaaagtaaaaaaaaaaaaagcaacacaaaaataaaagtctccctgaaaaaaatgagaagaccctgcaaaaacacaaaaggtggcaaagagcagattaaggcaagtgagcaacatgagacggaaataaagatattttttaaagaaaataagaggagtttaataaaaacatccaatgaacaaaagaatccttgaattggcagtgtagaactgttatcattattcacagtacaaatttaataaatactgtcttaaagagtagattcgaatatttagttcaagaagttaacatcataaagatgacacacacacacacacacacacaaaaacaaaaaagaatccaaacattccaaattacatggaagacacacagaaacaaagcacaaatatagagtatatagtgaaagatttataaaatagccacatcagaagcataacataaaatgcatctttccacacacacacacaaaaaagcacaagaactccaaaggatgacattaaaaagatgaccaaaggcatatctggagttgccaacagaaaagaaataagagcctcctccttaatattagatagggctgaattgcaggggaaaaaatattaaacaaggacacaatgtgaaatgagtttcggatgccgtatttactatctgtgcaccaaactacataacatcaaaatttataaacaaaaactataggaaaaaggccgggcgtggtggctcatgcctataatcccagcactttgggaggccgaagcgggtggatcacgaggtcgggagatcgagaccatcctggctagtctctaccaaaaatacaaaaaattagcagggcgtggtggcgggcgcctgtagtcccagctactcgggaggctgaggcaggagaatggcgtggacccgggaggcggagcttgcagtgagccgagattgcaccactgcactccagccggggcgacacagcaagacactgtctcaaattaaaaaaaaaagaactataggaaaatatagatagaaatacatttgtggtgggaaactttaataatatctctcagcaacttgagacaaagtagaaaaaaatgagtaatactatagaaacctcatagctatatatcttattgataagctatcaaatttttttcttttcaagtgcctatacaacaatcccaaaacaaaacaaaaaacaaagaaatacccgtaataatctctcgaaaagtaaatttctccaatgctgcaatcctaatcttattgaagttttttgcttttgttttcaagacagggtgtcactgtcacctaggctggatgtagtggcaatgtcgtggctcactgcagccttgacaggctcaagccgtcctccaatctcagcctcccaagtagctggtatcacaggtgccccaccaccacactcagttaattttggtttttgttgtagagacagggtctcactatgttgtgcaggctggtctcaaactcatgggctcaagcaatcctcccgcctcagtctcccaaagtgctggaattacaagtgtgagccaccacatatggccaaaagtaaagttaaaaaatgaaaatcttaaaacctagaaataaaatgtggtaaatggtatttaaagatttggtggggtagttaatgttctagaaattcatccttttcagctgggtgcggtggctcatgcctgtaatcccaacactttgggaggctgaggcgggtggatcacgaggtcaaagttgagaccatcctggccaacatggtgaaaccccgtgtctactaaaaaaatacaaaataattagctgggcgtggtggcgcacgcctgtactcccagctactcgctgggctgaggcaggagaattgcttgaacccgggaggcggaggttgcagagccaagatcacatcactacactctagcctgactacagagcaagactatgtctcaaaaaaaaaaaaaaagaaattcatccttttcatttagatttttttattcatttgcatgagataaattatttttctaaattatttttagtacagttttgctatataccagagcttctgatatatatataccatttttattgtttttgagatattttacaattttagttttgactttggctttggagtgggttgctgagaacatagcagttgtttcactaatcccagtaaaaacctactaggctattgttttcttctactcttcaatgcagttagttaacatatttgacttctgaatctatcttcataatttccagttctttcaggcatcaaggttaacactgtaaacaaaataaaacaaaaaccaaaagcaaggttgagaataattttaaatattattctttacccaaaacttcagcataatgaccaactataaaaatgcatgacctttccattattttttactgtgttggaaatgctgaatcaacattttaatttcttcaaggactttgaaccatttaaattcttaccaattatatctattttttgtaaacttttatccttttatttatactttcatatttttggcatgattttgtataatattcattcatgattgtttgaatcttaggtacggaactaactgtttctcctgttttgttacattcttttgtctttttttcagtcttgctccgtcgcccaggctggaatgcagtggtatgatcttggctcactgcaacctccgcctcccaggttcaagccattctcctgcctcagcctcccaagtacctgggattacagacctgcactgtggcaccctgccaatttttgtatttttagtagagatggggtttcgccatgttgactagactggtcttgaactcttggcctcaagtgaaccacccacctcagcctcccaaagtgctgggattacaggtgtgagccaccatgctgcccagtctttttttttttttttgagacagagtctcgctctcgctctgtcccccaggctggagtgcagtggcacaatctcggctcactacaacctctgcctcctgggttcaagcaattctcctgcctcagcctcctgagtaactgggactacaggtgcgcaccaccacatccggctaatttttgtagtagaaacagagttccaccacgttggccaggatggtcttggtctcctgacctcgtgatccacccatcttggcctcccaaagtgctgggattacaggtgtgagtcaccatgcccggctgcacagtctttgattatgtagatatttactccattttttgattgtcaacacatcaacttgtcaacacattttttgattgtcaacacatcaacacagcaacttgtgtttctgtcaaactcataccttaggtcttttttttttttaaacgtccaggattccaaaaagaagcaattaaatctatagtttttcccctctacccacaggatagctttagcacataaacttactttatttatttatgagacagggtctcactgtgtcacgcagactggagtacagtggcatgatcttagctcactgcaacctctacttcccaggctcaagcgatcctcccacctcagcctcctaagtagctgggactacaggcctgcaccaccacacctggctaatttttctattttttgtagagacggggtttcaccatgctgcccaggctggtcttgaactcctaagctcaagcaatccacccacttcagcctcccaaagtgctgggattacaggcatgagccactacacccagcctaccacacaaactttaaaatgcactactttatccaaatgttttgttttgttttgtttttgacatggagtctcactctgtcgcctgggctgaagtgcagtggcacaatcttggctcactgcaacctctgcctcccaggttcaagcaattatcctgcctcagcctcctgagtagctgggattacaggtgcccgccacatacccagctaattttttgtgtttttagtagagacggagtttcaccatgttggccaggctggtctcgaactcctgacctcatgattcgcccacattggcctcccaaagtggtgggattacaggcactgggcctggccccaaatgctttttaattgtggtaaaaatacacataacataaaagttgccattttaatatttttaagtgaccagtttagtgacatgaagtacattcacgttgtgtaagagccttttactttttatttttattttattttattttattttattttattttattttattttatttttgagatggagtctcgccctgtcgcccagcctggagtacaatggcacgatctcggctcactacaacctccgccttccaggttcaagtgattctcagcctcagcttcccaagtagctgggattactggtgcgtggcaccacgcacggcttattttttgtgtcttcagtatgagtcttcagtatatgagtttcaccatgttagccaggctggtctccaactcctgaccttgtgatccacccgccttggcttcccaaagtgctggggttacaggcgtgagccaccgccccagaccttactttttatttctaatttaatgctcttagaaaacagaatcagtatgatggcaaaggtttctattctttgtctgccttgagagtagtgtactaaaatggccaatggcatatttaatgatttctgttcatttttacttaatatagttcaaaaatacattattagttaaacaaatgttgataacttttataattatttgtatattcttccttttataagtatgaaccatcctcttcatccctttaagtgattttcaccttaaattccttttgacctgttcctaaattgcatccctagctttcttttggttcattcctttatttttaaatgaggataaaagcagcccctgaccgctgagagttagcctggtactatcagttaaacctcagttttgctagaagctagcctggcaggggccagctaactcatggtgttctccatggcgctacacaaaaataatctcttggaacaccaacagcaaacaagaccaatctctgaccaccatggtggaagacaaaaccaagaccactctgtcattatacttgagcacagacaaaaatcacaatcttcttcaaaccataaaaatctccttactctgcataaggaaagtgactgccaattatacctttaccaattatagcttttgcttcaatctacccttcatattttctaggtaaaaatgattaagatacccaatcataaaatttcccaataggaacagaagtagaggttcagtgaaattcagctagaagattcttattacctgtgactaaaaccagaaatgaaattctactacaacttacacatgcaacagaaaggaaagacatgagaagaatgcctactgctacatagttcataatatgagctgtattttaccaaacaaatatttaaaaagcaatgtgtgaaaatttagtctactatggcaccttttgtgaaatagaaagaaaaaaatgtgtacttgtttttacttgtttatagaactaagcaatcaaagaaaaagaataaaatcggtcctgtatgttgagaaacatgggggtaggtggggaacggaggtgggtgaatcacagatccatgtttcccctgaatttgtttcctataacacttttcagggtgtgttgcctttaaatgcatttctaattgtttttaatttttattttttactattattcccattttaccaatattatttttgaacgaagtgtatatattccctattcagaaaactaaactttcctaatacactatcacaatatctccagaggcataagaaataaaattatacccatgaaataagaacaagatgctaatcaaaaagaatatttagaaaataaattacagttattaaaaattaaaacgttgaattaaaatgttgatagtggtaacgagaaactcaaaagaagggctggaaggcaaatgtgacaaagcttcctgaaaaagagagcagcaaagaaatagaaaacagtagagggaaaaaaatggagaaccaatatccgaaaaacagaaatgtaaaaaaaaaaaaaaaagaaagaaagaaaatatttgtgtttgaggaggcagtttaggaagaaacaagagaaatactttgaaaatcccacagaaaagtgacttctaaccaggaaaatctatccacagcccaaagatcaatgtagtgtgatgacaaaataaacaacagtttttcttaatagtccacctctccactgtcgcacagatggcctccagagacgaagacattacccacatgttgctcattctcaacaggaagatcaagatttgtttcaggagcagcaggtctagagtccagctgcttcctgtggcccagctccctccctcagtcatgaggttctagtgacagaccagagatacctagtcctggattgaattcccacccccctgggactcctccttctcacctcataggagctgccatgatcctctggagccagggctgaggatttctgaggtgaggtccaattagctggcatggccacactgggtctcaaccctttttctgtagggtgtctgaagcttggcagtcatctgtgaactcaagcagagctgctctgaagagatgggctggagtctagaggaaaatctggcccaggggctccccagagacacccagaaacctggaaagacaatgttcccatagtcagtcatttcacattcaacacataagcacttcctggatatatcaaggtgcaggtccctgagctagaaaccaaagcagtggttctcaaatgggtatgcattcaagttacctggaggacctgttaaatgaaacacagttaaaaattctcagcctactccacagtttctgattcagtaggtctaaagtagaacccaaaaagtttcgtttctaactggtgcccaggaaacgctgatgctgtcagtacagggaccacactttgagaaccagcgctgaggagaacataaaatttaacaaaatctgtgataggtattagttacggtgaaatatgggaaaagtcatgagagatggagtaatgttactgcagatttgaactgcagctctgacacttttcacctatgagaacagaagtttcttcactttcttttgagacggagtctcgctctgtcgccaggctggagtgcagtggtgcgatctcggctcactgcaagctctgcctcccaggttcaagcaattctcctgcctcagcctcccaagtagctgggattacaggcatgcgccaccatgtccagctaatttttggtaaagacgaggtttcaccatgttggccaggatggtctggatctcctgacctcctgatccgctcgcctctgcctcccaaagtgctgggattacaggcgtgagccactgcgcccagccatttcttcacttttaatttcagaaatgaggatgaaaatgcttatctcaaagttacaaaaattaaatgagataatacttgtaaagtactcaacacctcccaggcacacaaaaatcatacaatacatatcagcgattaccatgcattatcagatattaaaacaatataaaaacaatgtaataaaaacaagtaaaacaataaatataccagacaatattgatctatatatgtgataaaagtggtattcaaatgagtgtgcataagacattcattgcataaatggcagtgatataatgcagtgatataactggctggccacctggaaaaaaacaaactagatctccatcacacactattcagtaggcaaatgccagcaggactgatcacttaattatgtgtatttgttaaatcacaaagactattaaaataaattttagaagtatacatgtgtataacactgtggtgggctgggagggatcttattacacgtgagaggaaacacagactctgtaacagaaaaatcagatacttttgattagatgatatttcctaactttatgttaaaatataccacaaaaaaaagtaggacaaaagatatgaaaattcacagaaaaggaaacaaatggcaattaaccaaataagatgccaactttagtaactggaaaatgcattggagcaattagatataattttccctcaaaattttaaaaacttttaaaatgcaacaatatccactgctggaaaagcatctgggaaaatgagttattttataaattgttggtataagcttgaattgttatattttgagctacttagtcatatctataaagtattaaaaatgcacatatgccgggcgcagtggctcacgcctgtaatcccagcactctgggaggcggaggcaggtagatcacctgaggtcaggagtttgagaccagcctggccaacatggtgaatccccgtctctactaaaaaatacaaaaaattagctgggcgtggtggcgggtgcctctaatcccagctactctggaggctgaggcaggagaatccgttgaacccactaggcagaggttgcagtgagctgagatcgcgccactgcactccaacttgggtgacagagcgagactccatctcaaaaaaaaaaaaagtgcacatagttattcctaataatttcacatatataaagcagaaaaagaaggacaaatggacaaataacctttccagagttgagtactttaccttcctctgtaattaagcagacaaaataatctgtgaggagacagatatattttttgaatatatgcttaattaatatctataacaatacaattagagaacatagtacactgtttctatgtaatagatgtgacattcatgaaaactgaccacgaactaggtcataaagcaatttttcaatttgaccattaaacagacattactttaaaaaggaacttctaaataactcatggatcaaagaaaaaaccacttagatttgaacaatttttaatacaaagattcaccaaaacttgagaatttttatattaaagaagactgaaaattaaaaagctgaactttcaactcaggttagaaagcaagctgattacagtcctcaccgatcaccataactgaccctacaggctctgtcactgaccacagactcccatcactgacccccaaacctcaatcactcatcccaaagagctccatcaatgacctgagaaatccgtcacaatcaacaacggacgccacagaaccccatcaccgaagcctgaaaccgcaatcactaactccacaggcaacctcgacaccccctattactggctccacagaaaccccaatcgtgatcaaccaaaatcacctcaaagatttatcggtattggaatatgaaaatactcctgacaccagcggcaaaaaagccttggaagaccacttccacttccggtccgacttctagcacctcccctttgtaggctgttgatatggcgcatgctctgaataaacttggaagccagtttcctcgaacagtcaacagggcgcagacacagcgcacaggttccgtaatgtggcgctgtccggcagagaacatggccgcgcccttatggtgtttattcgcgtgggccgccattttgaaagcatatccattccgtagagcagaggaattggccgctggcagggtttcctagagcgaggcaggtatagttacataggatgctggagtgtgacccttgtctgactaggcttctatttcggaggagaaagttactggaaatgtgggtctggtgctgtatgttatatttagaaaagctaagttacctttctgaatacaggacactgaggataataattaccagggaatagaggagccagggaaaaatcaccaagtgaaggggatcctgggagaaaccacaggcagatgataggaggaatcaggatagtacagtccattttttacagacgccattcagggaaaaggtggaaaggtcactaggggagtcatctcttgagtgaaaccaccctgaaagtctgagagacatctgaatgagtagtaggctgcaggaagagtggtacaacttttaatgggagaaaccgccttgggaaatagggtagaagtccaatagtattaatacaatcctctcctgggagataccaccagaggagggaggagaagtccgggcgtccccttctgaagggctgggtcgggtgggaaggtgaatagagatttgaatcacccattaccctccacactaaatacctcaagtgcaactatagtaggcagcaataataacaacactaatagtctttagtatggccaacgtgttactaaaagcacctaaagaagactgtttttatttaccttgaagttaaaatataattaataacaatcgccttaccatgtcaatgaagctttaagtgcagtctctgacccttagcttctcctctgtggaaattctgaaacctccttactcccctttttggagggtgtggatgaggagttgtaaagatacaattcctttcacttggtgaactcctaaacatgattcacagctcagcttctgacaggaagttctacctgaacagtggtgggaaattactacccaatgtgttcagttccagcaggtgggaaacttgttttcagggaattgaacctacactctgatgtgggcatgctggatgccttcaggccagttatgtctgtctctgggactcggcttaaaaatatgtttagagaattagactctgctgatctcaggttttctttcttctccgaaaggacggtctaaggaaacatctgtggaagtccgttagtaaacacacaatttctaccaaggggctaagaattactgttgattttgtcagtaatgcagctctgttaaaaagaagatgacttaacttttagggattcgtgtggaaatatttatgggtggaataatattagctttaaaaactccactgagaaaaaaaaaactccactgagaaggggtatatggtattgcaaaagaaaatgttgataaatgttaaagcagagtgataagtagacagaactcattataatgttctcttccatagtatttgtgtgaaattttcatagtaaatttctaatttaaaaagaaaggaattaaaaacatttacaaggaaacatcaagaagacagcaggtgtggtcatagtgttagggaagatgaaacctaggagacccagagtgacaccattttaagttcagctccatcttgacactagcaaggcacattcattgcaagtcacaactcatggtcctaatgtgtttacagcgaaggaagcagccctgtaatgcctgcaaagacaaactcctagaacaacagaaagtccagatgtccaatacccataacaataaatgctttcaagatcattatagttatactttgatgtacttactaaaatgtcagggatagttttctttaaatcaatagaataataaattttgtcataatgtcaggccacccacgcataggcacagcttactttagtctttacatagacaagacccctatataagaaaagcttaacagatgttcctccacttgctttctgaggacaccctactctgttgtggagtagctttcaataaactatctcttctcactgcactctacaacccacctggaattctttcctgcatgagatcaagaaccctctcttggagtctggattgagacccttttatttccataacaatagtattatacaaacacaggcatacctcagcgatatttagggtttggttctagaccactacaataaagcgagtcacacaatttgtttggtttcctggtgcgacatacactggggcctgttgggggtggggtggcgggagggagagcattaggaaaaatagctaatgcatcctgggcttaacacctaggtgatgggttgacaggtgcagcaaaccaccatggcacacgtttacctatgtaacaaacctgcacatcctgcacacgtaccccagaacttaaaataaaaattaaaggctgggtgcccgtggctcacgcctctaatcccagcacttggggaggccaaggcaggcggatcacgaggtcaagaggtcgagaccatcctggccaacattgtgaaactctgtctctattaaaaatacaaaaattagctgggtgtggcagtgcacacctgtagttccagctactcgggagtgtgaggcaggagaatcacttgaacccgggaggcagaggttgcagtgagttgagatcgcgccactgcactccagcctgggcgacagtgcaagactctgtctcaaaaaaataaaattaaaattaaaaaagtctattttgaaaaaaatagagaaagaaaacaacatgagaaagaaaaaggaacattactactgagagaaagatttaaaactcaagagaattctaaggatattttgagaaatccatttgaaaatgtaataaaataggaagtttcctaggaaaacacagatgaaaattgccatgtataggaagaaaatttggataggccaaaaacaataaaagaaattgaattggtagcatatgcaaaaaccaatcctatgtgtattaatgattcaaatgttaaaaacatagctttaagacttttagtaaaaatattagtaaatgtgttttagactctgtggcaatggaaagatctcttaaacagaacaccaaaaaagtattatatataaaaggttgataaaactgactatattaaaataataatttttgttcatcaagtgatagtaaagagaatgaaaaggcaaggtataaactggtgcagatacacatagaacacaggctacccgagatagcaggaatatgctttttaaaaaaccctccaaatcggctgggcgcgatctcggctcactgcaacctccgcctcccgggttcaagcgagtcttctgcctcagctgggatcacaggcgcctgcctaatttttgtatttttagtagagacggggtttcaccatgttagccaggctggttttgaactcctgacctcaggtgatccacctgccttggcctcccaaagtgctgggattacaggcgtgaaccaccgcacccagctatgcatgcatttttatgcgctgggagtgaaggtgtaggattaaccagccttctcaggaaaagcattatagctatgctataactattatactctgttataactacagcataattatatacaacactataacagagactgtgaatgatcatactagtgatgtcttttgaggggcagcattgcatgggggttggtataatggactctgtagttatctgtcctgggtttgaatctctctgtgctgttgactagctctgtgatcttgggcgagctccttcattcctctgtgactcagattattcatgtggaaaaggtgaatataataattgtagctatctcaagcattatgtaaattgaatgagtttatacatttaacgagtctagaacaggggcctagtatacattaaacacgtccctaaaatttgctgtagtcatcatcatcattatcatcatcatcacaattagcactgttgtgggtgccacatcttttttttttttttttttttttttgagacagagttttgctcttgttgcccaggctggagtgcaatggtgtggtcttggctcaccacaacctccgcctcctgggttcaagtgattctcctgcctcagcctcccgagtagctgggattacgggcatgcaccaccatgcccggctaatgttgtatttttagtagagatggggtttctccatgttggtcaggctggtctcgaactcctgacctcaggtgatctgcctgccttggcctcccaaagtgctgggattacaggcgtgagccactgcgcctggccgggtgctacatcatttcagcctcacatagaccttacaatgtgcagactattcccctctggcttacaagactgtcatcattcctaatagtggtatcaattgcaatgacaatagtaacaaatgcaagtaaccacaatgtccatgtggtagccagcctccaagattgttctcaatcaatcttacctcctcgatattcaaacttctatgtagtctcctttcacaaacaaaagtgaccactgtaaccaatacagccaccatgtggtgaagacactcaagtattcttgtggtgggttccttgtggtgagaaattgaggcctttcaccttctgctcatagtcatgtgagcgagcttggaatcggatcgaattagcttcagtcagccttcagatgactgcatttctgccatgtcaacatcctgattgcaacctcatgagagctcctgagccagaaccacccaactaaccttttagattttcagtcctcggagactatgcaagagaataagtgtttatagtcactttaagtcactaacatttgggtaatttagtgataattttctgtgatattattatggtgttaatttaatatttactataatagtggatattgctattaaaacaaactggagctgggcacagtggctcacacctatactccccgcactttggcaaaccaaggcaagaggatcacttgaggtcagaagtttaagaccagcctgggcaacataatgggactccatctctacaaacaaacaaacaaacaaaaatcagccaggcacggaggcacttgcatgaagtcctagctactcaggaggctgaggcaggaggatcatttgagcccaggagtttgaggtcgcagtgagccatgatggcaccactgcactccagcctgggcaacagagccagaccctgtttcaaaaaaaaaaaaaaaacactcagactgagggatttataaacaagagacatttattgcttatagttgtggtggctgagaggtccaagattaagatgccagaacattcagtgtctggtgacaactccctgcttcatagattgtgccatcttgctatgtcctcatacagtggaaagggcaaacaagctcccttagacgacttttataaggtactgatccaactcatgtgagcaaagtcctcatgacctaattatctgccaaaggccccacctcttaatattatcccactggggattaggctttaatatgaacttcgaagggacacagacatttagaccatagcaatagacaacactgcattataaatgggcccatttttcagagtataatagaacacaccgggttctcaggattggcatttattatagtcacaaactttatataaatgcttgtattaatgtggtgtttacattatcctatttcacagatggaaacagaaaataccagcttttttaaaatagcaatatctattattataataaatattgaaataacaccataataatatcactaaggaagtaatctaattgtgttgattttgcagagggagaaaaacattacctctagagctgaggctattgtgctcatgcaaactccaatctgaaggtggtagaaactagaagggacaggatttcttagcatcagagttcataaattattcatggtatcttaataattaaaggcatgtaacaaatagcgacaaagattgtgatattagttataaattatgataattatacttaaaaccaataatagaatcaacataaggtagaattaagtattgtagtgaataagtggtatgatatggggagtggggagtagagcaggatagggtggggtaggatataacatagataagagtcacatgggcacagtagcctcactgaagctgagggtggagggctcaattcattctgacattagggcaagtgtgcatgacaaccatggctttaacctgactttggtcacggggtcatcttctgccacaccgcatcacgttcattttccaattaagtgcctgagacccagaaccctcagccctgccacattcctcttgttccctaggttccatatttgctggtggctgctccagtgaatggggtggagcatatggcactgatgatggggaacgggattgaaagtactagggtggatgccaatggtaatagacctctgccactgggtcccttacgactgtcctccaccgacatggtatgccactgtgaccaagaggaggctgagttgggagaccttgtggaatgccagggaaggatgtaggtaggatacttgggaggagggtagcagggtggttgggcaccacccgcacatggaattagggctgggatatgctgaagcatggggtggggcattagattttgaattagaggacctggaaccaaccctaccacctcccacgcatttagccaatgtgtgtggggcatttggtcaatgtcaatactattgttattattcatccgttcattcgtttgttcattcattaacacatttaacaagcttgtactgaatgtctgctttgtgctggcaccatgttgggtgccttggacacagcagaaacaagacagaccaagtccaggtctcatgaggtctagtggaaaggttggatgaaaaaccaaaaaaaaagaaatatttaatatcaaatcagatggtgatgcctgcaacacaaatatatacaaaataatacagcagaaagtgaccccaatggatgtgttacttcagatacaaatggtggggtggatgcttttcaaagatgggggaagaaagcaagatgcatgggcactggggaagcagtgtatgcccagagaacacagttggtgcaaaagcccaaagctggagaaagcttccttggtgctaaatcagccagaattgggattcttgacaaacaataaaaatattgaccacctccaactgcaggctgtctgaaccctatgacccgttattatagttataactttatactataaacattaaatgtgattatgtaaaagtagaaataactaaaatgttacatgaaagtttgatatataaaatataaaaattatataatcatacgatactatatattatataaaatggaaactattttgtagtaggtataatatcataatgtgctataacatactgtcaacacaatatacagtgtatgatatgcacacataaaataaaatacataaatctatatttataatctagtatctaataatttttcaaatgtcatttaaactatcacatagtaaaataaaagagtacttctgagattcatccatgttgcagccagtgtcaataaatcacttcttttcatgttggggtagtattctattgtatagatgtttaattagtcacccactgtttaattagtcacccactgttacatttgggttgtttcctaattttggcaattatacagttgctgtgaaatttgagtacccgtgtttttatataaacaatttttcacttatctagggcaaatacctaggagagggattggtgggtcatatgataagtgtatgtttaacagtataagaagctgtcaaggctgggcatggtggctcacgcctgtaatcccagcattttgggaggctgaggcgggcagatcacctgagaccaggagttcgagaccagcctgaccaacatggagagacccttaactaaacctctactaaaaacatataaaattagccaggcgtggtggtgcatgcctgtaatcccagctacttgggcggctgatgcacgagaaacgcttgaacctgggaggtggaggttgtggggagccgagatcatgccattgcacttcagcctgagcaataagagcaaaacttcatctcaaaaaaaaaaaaaaaagctgccaaactttttgcccaaagtgaatgtaacattttacatttctaccaacaatgcatgaaagtttccattgctctgcattgttgccaactctcagcattatgtctttatttttaggcatgctaaaaggtgtgtacaggtatctcattgtggttttcattttcattttcttgaaaattaaagatgtcgagcatcttttcatcaccttattttccatttttatctcatataacaatatggatagatcgcaaatacatcacattaaatgaaacaagtccgactcaaaaagagagatacatacacatatataaacagacagagacacacacaggatgtctccatttatacaacatgtggaaaaggcaaaattatacagacagaaaatgggcttgtgatcatcaaggcctgggggtgggcaaagggatggactaaaaagtaataggaggaaatgtagggaagtgagggaactgttctctgtcttgactgtggtattgactgcatgatgtaattgtcaaaactttgagaattccacactaaaaagggtgaatattactgtatgtaaattatacctcaataaatacgaccttaaaatattacagtcatgttcacacaaaaacctgcacacaggtgtttatagcatctttattcataatcaacaaaacttggaagcaattaaggtgtccttcagtaggtgaatggataaataagtcatggtacttccagacaatagcatattattcaatgagaaaaaaaaaaaaaaaagagctagcaagctacgaaaagacatggaagaaacttaaatccacattactaagtgaaacaaatcaatctgaaaaggctgcatactttatggttcagaggcaaaattatggagacaaaagaaaatagccaggagtttagaggagtaggcgaaacacagaggattattgggacagtgaaacggctctttatccttctgtaataatgcatacatgtcattattcatttgtctcaacccacagaatgcacatcaagactgaaccctaattaaaccatggactttggccgatagtgtcaatgtagtttcatcaattgtaacaaatgtaccactctgaagggggatgttgatgatgggggaggctgtgtatatgtgagggtaggggatatatgggaaatctctgtaccttctgccccattttgctgtgaacctaaaatttctctaaaaactagtcttttatataaatgggcatacatatacatatatatgtcagcactaaaatatcacgttacaataaatataaaggagaaattattgaaagtcatgtacagtgaaatgtgttttcctccatatttcctggaattcatgaggagtgatacacttaggagtaaggtaaaatgggaataatgaaggggaccagaccttgttctagggtatgttaggaaggaagaggtgatctccaggcaccctcctgagagtcagctgacattgtcctaagttggggataatgttgtatcacaaaatatccaaaactgaaggaagaatagtgaagcttcagatacagtgctggatgaggtgaagggaggtaatgggtgagcagacattggtctaagatgttgagcagcatgtgatgggccatcagatactgtgaagaagtgaggaagcagagctaatgatggctcagtagacattgatctaaggtgaggtaatgggatgtgtcaccaagcactgcccaactagggcttgggaattaaaggggcattgtggccctgcttctttgactatgttctatcctttgggccccatcttcacctccccatactgcccttcttaaaggtgaaaccatctttgcagagcccaaatagttcccactcccagaactgccaatagactggccccagacgccacccagcaactgtgcatctaatcagatcatctgtcagcatctgtaaggccactgctgcctatctagggcaagatacctaatatccaatgaagatccacccaagtctgctctagttccctgctattggcttcaggcactcctctcggggcaggatgagcaggtgtgtggattgggttctggagtaaatgcggctctgtcgagttgcaactgagacaggacagcgctgtgcatgctgaggaaaaatgagcagggagtcttttgcaatcatgttggagctgtgggattctggaatcatggcaggaaatcctggaagcaagcatccacatgggatttcctgtacctgttttcccttctttagcatcagaccaaaaggttcacaatgactttttagctttagggttgagaagggatacagcccaggtacagactagaggtgaaaaagcctggtgtgttttagccaagttggttctccctattagcgcttcttatgctgcaacacagaaaaaaatcagacagaagtcacgcaacaagcatgggtcaactctccacaggtgcatttatggaatgcctgctgtatggcagtcatgggtctagactcatagtggtgaacaaaagggaaatattttctagtgtagaagccacagagaaatgaggaaaatacaccaggcagcatggtggaaattgctagggagaagaataaaggaggaagggtaaggggctggaattttaaaccaggcaggcagggaaggcctgtgtggaggtgtcatggaaaaaaagacatgacggacaagccacagataaaataaagaattgtgctctttgcaacgggcactgcaaatacaaaggccctgagtcaggaactgatgtttgaggcacatggcggggaaggtccttgtggggtgcgtgggacgaagatggacacaagtagacagtgaacatatggtggggttggttttcatatgagttatcaatttcatatgatttatgatttatctcatatctcatataatgtaagataatgatttcatgacttatcaacttatgaaagtcagatcattaaggaaagtaaaatgctgggcttcaactcagtcacaagtaaattaaaaaaaaaaaagaggcaggcaactgagtgagaagaattgtaatagcagaaggaagaatttaagttctcccagatgacctgaaaatcctaacctcaaaggctttcttgagggtggtgggagtgtacaaaacactgtgctgggccgggcgcagtggctcacgtccgtaatcccaggactttgggaggccgaggcgggcggatcatgaggtcaggagttcgagaccagcctggccagcatggtgaaacccccgtttctactaaacatacaaaaattagctgggcgtggtggcacacgcaatcccagctactcaggaggctgaggcaggagaattgcttgagcccgggagacggaggttgcagtgagccaagatagcgccactgcactctagcttgcccgacagagcaagactctgtctcaaaaaaagaaagaaagaaagaaagaaagaaagaaagaaagaaagaaagaaagaaagaaagaaagagaaagaaagaaaaagaaagaaagaaggaaagaaagaaagaaagaaagaaagaaagaaagaaagaaagaaagaaagaaagaaagaaagagaaagaaagaaagaaaaagaaaaaacactgtgctgggtgtcaaacacaatgtgctgagaacctgtggggctcagagagagtcctggcagataatgaaggggactgtaagtctttttctatgacaatggggactcaacatacgctctgaggtctgtgtctgaatacacagggagtttgtcttattgcagtatctcttgcttgatagaaatactcaatggggaattggatatgcacaactgtgttcgattcaaaagaagaaaatacccacaattctactagacagtgtgttctggaacaaacaactcacagaaggattcatcactatcatatatattatgttgtcttaccattcaaactgttggcactatacctaatccacagtaaacaggattatcattcccataatatgatctttcttatgaagaatttggtaacagtattctattgtagttttcatgagaaggcttttcctattcaccaaattgactcggttccttgtcagtatgaataatgacccaaggtttactggggatggtgacaatgtaggaagggtccctcgcctcattcagtgccttctcagaggccctctccagaacagccatgtgtgacattctgatgtggtcatttctatttacaataatatacatatttttctgctgcatgcgtgcaacagtgtacaatcagacccaaccctcaggggggttttctcacactgtttctctcaagcgtggctgctctgatgaacactgaacactgatttctgaacgaagcctttcccacagatgccacacttgtagggtttgtctccagtgtgtgttgtctgatgtttattcaaattggacctgttgctaaaggccttcccacactcagcacacacgtaaggcttctctccagtgtgaattcgctgatgcacttggagctgtgattttttagtgaaagacttcccacagtcactgcactcataaggtttctctccagtatgaattctgtgatgtgtaatcaactctgacttctgtcgaaaggtcttcccacattcagaacaaatgtagggcttttctccggtatgagttttctggtgcttactgagatttgacctgccactaaaggctttcccacactcggcacacacatagggtttctctcctgtgtgaactggctgatgcaccaggagctgagacttggaggtaaaggacttcccacagtcactgcattcataaggcttctctccagtatgaattctttgatgagtaataaagtttgacttgcggatgaaagctcttccacactcagtgcatacatagggtttctctcctgtatgaattttctgatgaacaatgagtattgatttctggttgaaggctttcccacattcgtggcattcatactgtctctctccagtgtgaattttctgatgtatattaagatttgacttctgagtaaaggcttttccacaagtattgcattcataaggcttctccccagtatggattctctgatgtgtaatcaagtctgacctctgggtgaaggcctttccacatttggaacatatataagatttctctcctgtatgagttttctgatgtgtaatgagatttgaccggttggtgaatgccttcccacatttattgcatacatagggcttttctcctgtgtgaattcgtttatgaacatggagttgtgacttggaagtaaacaatttcccacagtgaccacatttataaggtttctctccagtatgaattatttgatgtgtaatcaagtgtgccttccggatgaaggccagtccacatttcatgcatatatacgatttttctcctgtatgaattctctgatgcactgtgagtgctgacttctgagtgaaggctctcccacagtcactgcattcataaggtttctctccagtgtgaattctctgatgaataatcaactctgacctgtaggtaaaggccttcccacactcagtacatatggaagatttctctctactttgaatcttctcatgtgtaatgaggttggaattattgctgaagaccttcccatattcggtacatatatagggcttcactcttgtgtgaacacgttgatgtacctgaagttgtgacttggaaatgaaggatttgccacagttattgcattcatatggtttttctccactatgaattcttcggtgtgcaatcaattgtgttttctggatgaaggcctgcccgcattcaatacagatgtaggatctctcgcctgtatggattttctgatgaatcttgagtgtggacttttgtgtgaacgctttgccacagtcagtgcattcatggtgtctctctccagtatgaattttctcatgtatactgagatctgagttataagggaaacctttcccacattcactacattcatatagtttttctccggtatgaattctgtgatgcctgaaaagagacgatacttgaaaaaaggattttccacattcattgcacttatagggcttctctctcatatgggttttctgatgtgtgatgaattctggcttctgtacaaaagccctcccacattcaatacatacatagagtttttctcctgtaggaactttcagatgtaccttgaactgtgacttccaggtgaagctctttccaaattcagcacactcataggatttttccccagaataaattttttgatcttgagaggaagctggtttataaccgatgatttttctatgttgattatggtcccataatttctctcctgttggagtacattcacagtaagtatagaaagacattttaccatagttagtactcttcttaacattctttgaagcatcgtttctatcatgaatgtgtagatctaaattatgcttcaagccatttccaaataagtcacactgatagggtttttagggggatgtaaaatgtttgggttcacatgaattatccttctgatagccttatattcataatgcctatttgtagtcaatattttcttgattaaagcaacatcacttagatacttattttcttttctgataatattctatctggttatcagtctgtcactgttattctagaatgaaatacaatctcacatcatctctatcatcatcttccctttcattgtggaaagaagtcttttttttttccagagattccctgtaataaggtttgaaatccaaacactttttcaagggataataagtcactttttgcttatagagcagctagcagaggctagaggggaaggtaaaaatggcttatccagcttgaacacagagaaaagggtaagggtgagtaatttcatgagaagggtgtgacactacttaaatgaaacattctggggaacaattcagcagttaaaagaaataaactagatgaacagataacaccatggatagacatggaaaaaggcaaaaaacatgatatatagcataataagatttatataaactaatgatccatgcccctaattcactttaaattttacaacatgcacgaattaaaaaatgcttccattatacaaaacagtggcttctggtgggaaggcagatgggtgaggggaaagagagaaaaggggatattatcacaaaaataaaatgagaatcttcacccacattttcatggtcatagtgtgtcctaaactaaagacaatgattaaactcaaacctcatcaggtgaaatataaaaataaagcaatgacaaaaacaaacaagcccgggcatggtgcctcatacctgtagtcccagcactttgggaggctgaggcgggcggatcacctgaggtcgagagttggagaccagcctgaccaacatggagaaaccccaactctactaaaaatacaatgttagctgggcgtggtggctcatgcctgtaatcccagctacgtgggaggctgaggcaagagaatcgcttgaacccgggaggcggaggttgcagtgagccgagatcgtgccattgcactccagcctgggcaacaagagtgaaactccgtctcaaaaataaataaataaaaataaaaatacaaaaattagccaggcgtggtggcccacccctgtaatcccagctactcgggaggctgaggcaagagaatcatttgaacctgggaagtggaggttgcagtgagccaagattgcgccactatactccagcctgggcgacagagtgagactccctctcaaacaaacaaacaaacaaacaaagccaaccaggaagagagaccctaacagtgtggaatcgctcaagcaacatcagaaggaaatgtgagaaagggtgattaatccatgccatgtcaaacacagcagagaggtattcccaaagattaagtgacaatgattcccaagtcattagctggatgaaaggcctgaaggactgggaagataagagaaatctcatggccattactatagcaaaaatagttagagagcctgactggaaataaagttcttttttttttttttctttttcagactgagtcttgctctgtcacccaggctggagtgcaatggcatgatcttggctcactgcaaccttcacttcccgggttcaagtgactcttgtgcctcaccctcccaagtaactgggattacaggcatgcaccactacacccagctaatttttgtatttttagtagagatggggttttgccatgttgtccaggctggtttcaaactcctgacctcaagagatacacccaccttggcctcccaaagtgctgggattacaggcatgagcaactgtatctggcccagagataaagttctgaggcatctcacagtgagaaagacagaaataaaaggggtgtagcacgagtgggagtgtgtgacacagagtaaattttgaaagaaagcagatccaggaatacctggatgtaaacgagagactctaggacaatatggaaggcagggaaaaaaagactgttacagaaaaggaatataataaagatttatctttaatgaggctgactggcacatgacttataatcaacaaggaaggtcatccaggtagaaggcatttagtgatctgagaggcatcaagcaatataaaaaattcagagccttactgaagagtggtcttaatagcacttcacaggttccagtgtttttcaagacagctgagatttcctcctgtctcccatctaacctgagtcacattcacctcacttcactcacctgggcagctgtgacgtggcctctcaccctgcagtgcccatggttcctttccttgctccaacatgaccacctctggtttaggaacttgataccctgttcatgggaaatgataaaggtctgggtccagctaattacgtttcagagcccaacaaatacagtcttattgttcaatgatggtttgttctttaggaaagtaaccagatatctctgagtaatattctgagtaccctaaacaaacagagaaccctggaggaaaaaaggacaaaaccatcacctatctaagatgccaacagcattcgtcaactgagaatgaaaacactctcagtgaggcctcctttcagataccaaggtgactgtgcttacctactgagagcaggtggctgtaggtctccagcatcacatcccggtacaggtttctctgagaaaggtccaggtgccgccattcctctctgctgaaatcgatagccacatccctgaaggacactgatccctgtaagggcacattcctgttcaatgtgcatagtcagctttgcacggtggagtgactatatatgggattacggaacatgggttttgttgtttttaatttacttcattttttttttgagacagtcttgctctgttccccaggctggagtgcagtggcgcgatcttggcttactgcaacctccacctcccgggttcaagtgattctcctgcctcagcctcctgagtagctgggattacaggcacgtgccaccacacccagctaatttttgtatttttagtagagacggggtttcaccatgttggccaggatggtctcaatctcctgaccttgtgaccttgtgatccgcccacctcgacctcccaaagtgctgggattacaagcttgagccaccgcatctggccgtttttgtttttgtttttgttttttttccttgagatggaatttcactcttttggcccaggctggagtgcaatggcgtgatcttggctcactgcaacctccacctcccaggttcaagcaattctcctgcatcagcctcctgagtagctgggattacaggtatgtgccaccatacccggctaaattttgtatttttagtagagactgggtttcaccatgttggccagaatggtctctatctcctgacctcgtgatcttcccgcctcggcttcccaaagtgctgggattacaggagtgagccaccgcgcctggccaatttacttcctttttaaagaacctgccactcatttccctaatagcttattacgaaaaattttaaacatacagaaaattagaaagaattgtacagtaaaaacctatatatctactacttagatctaccattaacaccttaccctacttgcttcatcacacattgatccatcttacttttttttatgtatttcaatgtaaattgcagtcatcactacactttctcttaagcaccacaaaatgcaaattattaactagggtgtaacatttgttaacctgataaggtaaaatttagtacaatacaaataaatgcaacaatctttattttgccatttgaccttgtgacaaatgtatacacctgagtgataagaaatttctaagaaataatattttacataggtcacatattaaatatccagttttagctggggtgcagtggctcacgcctgtaatccaagcaagaatgtcagagggggccggacacggtggctcatgcttgtaatccaagcactttgggaggccaaggtaggtagatcacctgaggtttggagttcgagaccagcctggccaacatggtgaaatgccgtctctattaaaaatacaaaaaattagccaggctggtggcacgtgcctgtagtcccagctatttgggaggctgaggagggagaatcacttgaacttgggaggtggagtttgcagtgagctgagattatgccacggcactccagcctgagcgacagagggagactctgtctaaaaaaaaaaaaaaaatctagttttacataatttgtggaacacagaaatctaacaaagaattccagctatttgttctgttctacagtcagtcaatcactcatttttcaaaactggccattgaaataggctgtcttggctgggcccggtggctcatgcctgtaatcccatcactttgggacgccgaggtaggtggatcacgaggtcagacgttcaagaccagtgtggccaacatagtgaaaccctgtctctactaaaaatacaaaaaattagccgggcatggcgagcacctgtaatcccagctactcaggaggcttaggcaggagaatcgcttgaacctgggaggcggaggttgcagtcagccgagatcatgccactgcattccagcccgggatacagagcaagactccatctcaaaaaaagaaagaaagaaagaaataggctgccttttagtcttctagcacatggatgaacaacctgccacacagtggctgatcaatttaggaccagtcattatgctactcctgaggacacagaaatgaattatttatgttactagtcttcacgcaacctgaaatacatagaaaataaataagaccaaagtttgaaaaagtgaagacattaagttcattaaggtgctgaaaagtagatctctatctgagacaccctgagggctaaaaagaagaaaaagtgcattctacatgaggaaataagtttacatttcatagagcggaagaatttaacttggaagataagaagagtaatacaaagtatggggtaagggggacattgcccagcaaagacaagaacaaaaagatggggagatgggctccagtgagccacgattgcatcaccgcactccaacctgagtgacagagcgagaacctgtctcaaaaaaaaaaaaaataaaataaggccgggcgcagtggctcatgcctgtaatcccagcactttgggaggccggggcaggtggatcacctaaggtcaggagttcgagaccagcctggccaacatggtgaaaccccatctctactaaaaatacaaaaaattagccaggtgtggtagtgtgtgtctgtaatcccagctacccaaggcagaggtaggagaatcgcttgaacctgggaggtggaggttgcagtgacccaagattacgccactgcactccagcctgggtgacagagtgagactccatctcaaaaataaataaacaaataaataaatattaaaatacacaatgagggccgggcacagtggctcacgcctattatctcaacaactggggaggccgaggtgggtggatcacgaggtcaggagtttgagaccagcctggccaacatgttgaaaccccctctctactaaagatacaaaaaattagctgggcacagtggcacatgcctggaatcccggctacttgggagactgaggcaagcgaatcgcttgaagccaggaggcagaggttgcagtgagccgagattgcgccactgcattccagcctgggcgacagtgcaagactccatcttaaaaacaaaacaaaacaaaaaaaaacaccacatgagtttaaagaacagcaaatagggctggacatggtggctcacacctgtaatcccagcactttgggaggccgaggcgggcagatcatgagatcagaagattgagaccatcctggctaacatggtgaaacaccatctctactaaaaatacaaaaaattagctgggcgcagtggcgggcgcctgtagtcccagctagtcaggaggctgaggcaggagaatggcgtgaacccgggaggcagagcttgcagtgggccgagattgcaccactgcactctagcctgggtgacagagcaggcctctgtctcaaaaaaaaaaaaaaaaagagaactaaggccagggcaggggctcacgcctatagtcacagtattttgggaggccgaagtgggtggattgcttgagcctaggagtttgagaccagcccaggcaacacagtgagaccctgtccctaaaaaaataccaaaaaaattagccatgcctggtggcaggcacctgtagtcccagttactcgggaggctgaggtcggaggatcgactgagcccgggaggtcgaagctccagtgagccgttaatgcaccactgcacaccagtctgggtgacagagggagaccctgtctcaaaaaaataaataaaacttaaaaagtaagagacttacgaatcatactaaccaaatgcaccttgtggactttggcccctaattaaaatgaaccaatcttaaaaagatatttacaacaatttagagaaatgcaagcaatgggtattagatgataacaaagaattactgttattttgttgtaggtgtgatattgacttatttgttatgctaaacaaaagaaaaaagaattcatctctttgagatacatatcaaagtatttttagataaaacattgtgtttgagattcactttaaaataatccaggagctgtgtaggaaggtggtttcagatgaaataagaatggcagaatgttgatgatgactgaaactgggtaaaaggtacaataggtgaacaggttgcttatactattctctttacttttgtatatatttaaattttttcgtaataacatgtttttgaaaaatatgatcctccaaataaaaaatctaatttggaattgcacagttaaaggaatgcctatttccacatggtgtacatatttaaagaaaagtattggctgggtgcagtggctcacacctgtaatcccagcactttgggaggccgaggcacatggaccacctgaggtgaggggttcaaaaccagcctggccaacatggcaaaaccccatctctgctaaaaatacaaaattagctgggcatggtggcgcatgcctgtaatcccagctacttgggaggctgagggaggagaattgtttgaacctgggaggtggaggttgcagtgagccaaaatcacgccattgcactccagcctgggcaacaagagcaagactccatctcaaaaacaaacaaacaaacaaagtatactagggacttgaatacccttccctcacctcagcaatttatcaaaatactagacaggaaatcatcaaatatacagaaaaagaagcaacagtatttaattgatatttatagactactgcaacaaacaacagcagaatacacattcttttcaagaatcatagaaaaatgaccaagatagaccataccctaggctataaaaccaacctcaacaaatttaaatgaataaaatacaaagtatgttccacaaggaaatcaaacaaaaaatcaataacagaaagaccacagaaaagtctccaaaggaattaaaaaataaaaacaaaagctttctggaaaagcaaaaactatttggaaattaataacccacagttaaatgacctataggtcaaagaagaaatctcaaaggtcattttaaaaataaatacacctggccgggcatgatggctcagcctgtaatcccagcactttggggggccgaggcgggtggatcacatgaggtcaggagttcgagaccagtctggccaacatagtgaaaccccatctctactaaaaatacacaaaattagcagggcgtggtggcacgcacctgtagtcccaactacttgggaggctgaggcaggagaatcactggaacccgggaggaggaggttgcagtgagccgagatcatgccactgcactccagcctaggcaacagagcgagactctgactcaaaaaaaaaaaaaaaaaaaaaaaaaaaaattcaggaaaacaaaacaaaaaacagaaaaaaaaagtcaataaaacacaatccagttgttggggagaaaaaatcaacaaaatgcggctgattggcctgttagtcaactagactgatgaaaataaaaagacacaaatcagcaatatcaggaataaaacaggaaatatcatgacagattcaggaaccattaaaagaaaaatatgggaatacaaacacttatttagataaactaaataaattagcttatttagataagataaataatcttataactattaaattacattcataatttaaaagttggtgaaaagaaatttctaggcctagttttgccagagaattctaccaaacttacaaagaagaattagtcttggccgggtgtggtggctcatgcctgtaatcccagcactttgggaagctgaggcgggcagatcacctgaggtcaggagttcaagaccagccttaccaatatggagaaaccccgtctctactaaaaatacaaaattacctgggcgtggtggtgcatgcctgtaatctcagctactcgggaggctgaggcaggagaatcgcttgaacccaggaggcagaggttgcggtgagccaagattgtgccactgcactccagcctgggcaacaagagcaaaactctgtccccctcaaaaaaaagaagaagaagaagaattaatgtgatttttacacaaactcttccagaaaatcaaagaggaagacctcttccaaattaactttgtacagccagtattactctgacatcaaaaccaaagaaagcacaaaaaaagaaaactatagaccagtatctttcataattttaggtacaaacatcctcaacaaaatatcagcaaacaatccagcaatgaataaaaagaatcgtgtactacaataactgaaattcatgggggaaccctctgtatcattttgtaattctctgtggatctataattatttcaaaataaaaagttttaaaaaatatactcctaaagaaagattattccaaaacatttggaatattttggaatagttatgactggaaaatcattgacaagactcactgtacaagtcacatgagagaatgtgaattacagttcacctttgaaccacatgggtttgaactatgtgggtccatttgtaacacagatttcttttttcagtaaaattacaccgagtgtgcctccctctcctgccctcccttttaccttcacctcttccccctttgccacccaaaacagcaaggccaaactctcctcttcctcagcctccttaacctgaagaccataagggcaaagaccttcatgatgattcacttccacttaataaataataaatatattttctcttccttttgattttcttaaaagcattttcttttctctagctgaattttattataaaaatacagaatataatacatataccatacaaaatacatgttaaccaactctttgctatcggtaagttaacagcaggctatcagtagttaagtttcagggatggtcaaaagttatacacagcttttcaactgcacagaggttagcgccccaagcctgcatcgtttgaaggacaactgtgcttagtataattgcggtttctgccattttttctttttattatactttaagttctagggtacatgtgcacaacgtgcaggtttgatacataagtacatatgtgccatgttggtgtgctgcacccatcaactcatcatttacattaggtatttctcctaatgctatccctctcccagccccccaccccacaacaggccccggtgtgtgatgctccccaccctgtgtccaagtgatctcatagttcaattcccacctacgagtgagaacatacagtgtttggttttctgtccttgtgatagtttgctcagaatgatggtttccagcttcatccatgtccctacaaaggacatgaaatcatccttttttatggctgcatagtattccatggtgtatatgtgccacattttctcaatccagtgtatcactgatggacatttgggttggttccacgtctttgctattgtgaatagtgccgcaataaacatacatgtgcatgtgtctttatagtagcatgatttataatcttttgggtatatacccagtaacgggattgctgggtcaaatggtaattctagttctagatccttgaggaatcgccacactgtcttccacaatggttgaactaatttacactcccaccaacagagtaaaagcgttcctatttctccacatcctctccagcatctgttgtttcctgactttttaacgattgccattctaactggcgtgagatggtatctcattgtggttttgatttgcatttctctgatgaccagtgatgatgagcatttttttcatgtgtctgttggctgcacagatgtcttcttttgagaagtatctgtttgccattatttttaatggcaaaaccgcaattacttttgcaccaacctaatacataaagtaaggctataatgttaacagggatgtagaaggaaaatggcactaattattagggaggcagacctgatgttgaatatgaaggtgagaaaaaggattaagaaataattcttagtcatcaattttgtgtcactatgtacattctggtgccaggaatgtgtagagaaggctgaggaaataaaaaaaaatgacttaaattttgtatatgttgagatttagctgacaggatatatacgagggtgtacactaggtggtggatagagagcttatgattaattgtgatagagattagctgaatagagagcttatttatttattttattattattattttttgagatggacttttgctcttgttgcctgggttggagtgtaatggcgtgatcttggcttactgcaacctccgcctcccgtgttcaagcgattctcctgcctcagcctccccagtagctgggattacaggcatgtgccaccatgcccggctaatttttgtatttttagtagagactgggtttcttcatgttggtcaggctggtctcaaactccctacctcaggtggtccaccagcctcagcttctcaaagtgctgggattacaggcatgagccaccaggccaggccattccagtgttttacaagcactttgggaggccaaggcgcagatcacctgaggtcaggagttcaatatcagcctgaccaatgtggagaaaccccaactctactaaaaatacaaaaattagctgggtgtggtggcacgtgcctgtaatcccagctacttgggaggctgagacaggagaatctcttcaacccaggaggcagaggttgcagtgagccgagattgcgccattgcacttcagcccgggcaacaagagtgaaactctgtctcagaaaaagaaaaaaaaaaaaaaaaagaaagctatattattaatatagtcacaatattatttattgtataaagattcagaggtcctttgtatagaggtcactggattcaggggagggtatgagcatgcagatggaagtggaaagaaaagtactaaagatatttataatttttaatatgtaaaattatgatttttgaaagctaccttgttgatttcttcatttaactgcattcagagattacagtttgtctcttgtgatgcatattgattgtgcttatagggctcagaacatcatttctttgaaaatggtacctatatacctgaaaagaatatacatgttctaatttttctctttatcatacacttgtatagtcacaccctacacacaccaaactccccaacccccaaaccctatgttatcaagaatttagtaggaacacgagatgtcatgttaggctggaatagagctttaccacctcaccaaatgagcttcttatacacagtttgtccaggctgggtgcagtggcccatgctgtaatcctgggattttgggaggctgaggcaggcagattgcttgagcccaggagttcaagacaagcctgggtaacatggtgaaactgtctctacaaaaaatacaaaatttcgccagttctattggcgcgtacctgtagtcccagctactcggcaggctaaggtggggggatcgattgaacctgggaagtccaggctacagtgagccgtgattgcaccacagcactccagcctgaggatagagtgagaccccgtttcaaaaaacaattaaaataacagtttgtccaggaagaaacctcctcactcaaagataatactaagcatcgcctaatgtacaaagatactatgagcaaaaaggataaaacaaaaatagagaggagattaaaaggaatacactacaaataatatactacaaataaattgacacacaacagaaaaaacatccaccatgaattcaaggaattcactataattataactacttaaaataattaaacaggccaggcgctgtggctcatgcctgtaatcccagcactttgggaggccgaggtgggtggatcatgaggtcaggagctcgagaccagcctcaccaacatggacaaaccccgtctctactaaaaatacaaaattagctgggcatggtggcacatgcctgtaatcccagctactagggagtctgaggcaggagaatcgcttgaacctgggaggtggaggttgtggtgacccgagatggcgccactgcactccagtctgggcaacaagagcgaaactccgtctcaaaaataaataataaaataaaataaaataaaataaaataaaataaaataaaataattaaacccaaggaagaaatagtggaaaaacagataggctaagaatgtggttatgtaaatttttgaaaaataaattggcagaactcagtaaagtttttttgtttttcaagcaacacagaaataaaggtctccttgaaagcaatgaaaagaccctgctaaaacacaaaaggtaggccaggcacggtggctcacgcctctaatcccagcactttgggaggctgaggtgggtagatcatgaggtcaggagctcgagaccagcctggccaatatggtgaaatcctgtctctactaaaaatacaaaaattagccaggcatggtggcgcgcgcctgtaatcccagctcctcaagaggctgaggcagaagaatcgcttgaacccggcagatggaggttgcagtgagccgagatcgtgccactacactccagcctgggtgacagagcaagattctgtctcaaaaaaaaaaaaaaaaaaaagcacaaaaggtggcaaagacaagtgagcaacataaaatggaaataaggagtttcaaaaagaaaatagaaaaaaagaatttaataaaaacatctaattaaaaaatccttgaagtggcagtatagaacttttattgttattcacagtataaatttaatagtcttaaacgatagatataaagattgggttaaagaaggtaatgttataaagccgccactaaaagaacaaaagaaaaaacagaggccaggcacggtggctcacacctgtaatcccagcactttgggaagctgaggcaggcggatcacctgaggtcaggagtttgagaccatcctgcccaacgtggtgaaaccccatctctactaaaaatacaaaaattagccgggcatggtgacacacacctgtaatcccagctactccagaggctgacgcaggagaatcgcttgaacccggaagccagagactaccataaggcaagatcatgccattgcactccagcctggcaacagagcaagactccgtctcaaaaaaaaaaaaaaaaaattatctttccactgccatacagaagaaatgtacaaggactccaaaggatgacagtaaaaggaggagcaaaggcctatctggaattgccaaaggaaaggaagcaagaacctccaccttaatatttgagctgaattctcaccaaaaaaattaaatatgacaaggacacaatctgaaatgaatctcagatgccattactgtcactgcaccaaattacatagcatcaaaatttataaactataggaaactataggaaaataatagcaagaaatacattggtggtgggaaactttacataatatctcccagctccatttgataaagtagaaaaaaatcattaatactatgaaagcctcataactatataagatatcttataagttaccaataaaatcttattgctaagatatcaaattctatatcctggaaacagatttcctgtttacacagtgccggtgtaacattcagaaatgttaaacataaaattttcaaaacaaaaaacacaaaaacctttaatgttatgccacatgcaaataattctctccatctctgcaatcctaattttattaaaagtagaatattttaaatgaaagtcttaacatgtagaaatgaaaatgtggtaagtggtcaatgaagacttggtgcttggtgggaaacaatatgttactagaatttcattctttttttctagatttttaaatgtaattgcataaggtaaattacttctctaaattatttttggtactgttttgctagactgtgtaccattacttctgatatacagtatttttttgaggtattttactattttagtttttagacttctttgactttggactgggctgctgaatgagaaaacagtgcttgcttcacttttttcccagtgataaactattagtctactgttttcatctactcttttttttcttttttgagacagagtttcgctcttgttgccccggctggagtgaaatggtgtgaactcaccgcaacctccacctcctgggttcaagtgattctcctgcctcagcctaccagtagctgggattacaggcgcccgcctaatttttgtatttttaatagagacagggtttcatcacgttagccaggctggtctcaaactcccgacctcaggtgatccaccctccttggcctaccaaagtgctaggattataggcgtgagccacggcacccggcctcatctactcttgaatacagttagtgaatacatttgacttctgaatctatttatttccagttcttttgggcattgaagttaactctgtaaacaaaataaaacaaaaacctgaaacaaggttgagaataatttctgatattatctgttactcaaaactttggcatgaaaatcaactgtaaaatcacatgatcttttccatcatttttgactgcgttgggggtgttgaatcaacattttaattcctttaagggcttctgtataatttgttcttaccgagttgaaaatttatttcttataaaatttcatccttttgtttaggttttcatatatttgcatggtttttttttttttttttttgagatggagtttcgcgcttgttttccaggctggagtacaatgacgcaatctcagctcactgcaacctccgccacctgagttcaggcgattctcctgcctcagcctcctgagtagctgggattacaggtatgtgccaccatgcccagttaatttttgcatttttagtagagacagggttttaccacgttggtcaggctggtctcgaactcctgacttcaggtgatccactggccctggtctcccaaagtgctgggattacaggcatgagccaccacgcccagccctatttgcatgattttacataatactcactcgtgattgtttgaatcttaggtatagaagtaactattactcctgttttctaacatattttgattatgtttatcttcactcttttttcttgatcattaatatggagaagcaacttgtgtttctgtcacatttttatcaaccattttttgttctctgtgactcatgtctttgcttttctttttttagtcctcgttcttttttgtattttttgactcattctttttgtaacttcttcagttgaaaccataactgcttttttcccaaaatttctaagattccttaaaaggcacttaatctatagttttcccctctatctacagtttagctttaccacacgaactttaaaatgtagtactttattagcagggcacagtggcaggtgcctgtaattccagctaggagggaggctgaggcaggagaatcacttgaacccaggaggcagaggttgcagtgaactgagatcgtgccaccgcactccagcctgggcaacatagtaagatcttgtcacaaaaaaaaaaaaaaaaaaaagtagtactttattgaactattttgcgttgtggtaaaatatacataaaatttgccattataattatttttaagtgtccagttcagtggcattaagtacattcacattttgtgcaagagcctttctgttttgttttgttttggtttttgagatggagtttcactcttgttgtccaggctagaacgcaatggtgtaatctcggctcaccgaaacctccacctcccgggttcaagcaattctcctgcctcagcctccagagtagctgggattacaggcatgggccaccacgcccagctaattttgtatttttggtggagacagggtttcactatgttggtcaggccagtctcaaactcccgacctcaggtgatctgcccgcctcggcctcccaaagtgctgggattacaggcatgagccaccgcacccagccttcaagagccttttacttatttgtaatttaatgctctttgtcagaaaacaatcaatattatagcaaagatttatattttttatctgctttgatcaataagcttctgaaagtagtgtgataaaatggccaatattgcatttaatgatttctgttcatttttacttaaaatagttcaaagatacattattaattaaaaaaatgctaataatttgtataattctttgtacatgattcttttcataaggatgaacaacatgttttcatccctttaggtgattttcatcttaaatcccttttgatctgttcctaaattgcagccctagctttcttttggctcactctcttatttttaaatgaggacaaaagcagtcctaacctctgagagttagcctcgtactatcaattaagcctcagtgttgctagaagctaacctggcaagggccagctaattcatggtgttctccatggtgctacacaaaaacaatctcttagaacaccaacagcaaacaagaccaatctctgaccatcatggtgtaagatgataccaagaccactctgtcgttatatttgagcatagacaaaaatcagaacattcttcaaaccacaaaagtgaataaaagtctccttattctgcctaatgcaagagactgctgcttttttcttttgagacaaagtctatctctttcatccaggctggagtgcagtggcatgctcatagctaggtgtaatctcgaactcttaggctcaagtgatcctcctgcctcagcctcccgagcaggtgggtctataggcacacagcaccatgccagactaattgtttttcttttttttttttttgagacagaggctcactctgtcacccagactggagtgcagtggtgcaatctcagctccctgcaacctctgcctcctaggttcaagcgattctcctgcctcagcctcctgagtagctgggattacaggcgtacgccaccatgcctgacaaatattttttatttttagtagagacggggcgtcaccatgttggctaggctggtctcgaactcctgacctcaggcaatctgcctgcctcagcctcccaaagtgctgggattataagtgtgagctaccgcaccaggcccaaactaatttttaatttaattaaattttttttttggtagtgacagggaatcactacattgccagggctggtcttgaacttctggcctcaagccatcctcccaccctggctttccagtgttgggattacaggtgtgaacgaccgtgcccagccaactgctgctgctttaccaactgtaactttagcctcaagctatccttcctatcttctagaataaaattattaagatactcaatcctaaaactgcccaagagcaactaaagtagaggttcactgaggtgcagatgagactctcaccacgtgactagaaccctgaaatgaaattccactacttctaatatatccaatagaaagagaaggcatgacaatatccactgcgatattgttcataatagtttctgtattttaccaaacaaacattaaaacagcaatgtacaaaaaagttaatctgctatgccattctgaaatcaagagaaaaaaattgtagttgttttcatttgtatacagaactaagcaatcaaagaaaatgaataaagcaggttatcactaccgggagacacaggtagatggaaggcagaggtgggtgaaccacagtcccatctctttcaccataatacttttcaatatattgcttttcatatatttctaacttttgaactaggtatatgcattgcctattcaaaagattaaactattcctaataaattatcacaatatcttcagatggataagaaataacaatacacccaggccgggcatggtgtctcacacctgtaatcccagcactttgggaggccgaagcaggtggatcacctgagggtcaggagttcgagaccagcgtggcccagatggtgaaacaccatctctactaaaaatacaaaaattagccaggcgtggtggctcgcacctgtaatctcagctactcaggaggctggggcaggagaattgcttgaacctggatggcagaggttgcagtgagcggagatcatgccattgcactccagcctaggcaacaagagcaaaactccatcaataaataaataaataaataaataatttaaaaaataacattacatccatgaaataagaacgggatggcaataaaaaaaaatttaggaaacaggctgggaacagtggctcatgcctgtaatcccagcactttgggaggctgaggtgggcagatcacctgagatcaggagttcgagatcagcctgatcaacacggagaaaccccgtctctactaaaaatacaaaattagccgaacgaggtggcacatgcctgtagtcccagctatttgagaggctgaggcaggagaatctcttgaacccaggaggcggaggttgcagtgagccgagatcatgccattgtactccagcctgggcaatgagagcaaaactctgtttcaaaaaaaaaaaaaaaaattttaggaaacaaactagagtttttaaaaattaaaacattaagttaaaatgtggatagtggtaatgagaagctcaatagaagggctggaaggcaaaaggtgtcaaagttacccagaatggatagcaggaaatacatagaaaatagtagagaaaagaaatggagaagcaacatctgaaaaacaagtttcagaaagaaaacagagaaaacatttgtgtttgaggaggtggtttaggaagaaatgaaaaaatgctttcaaaatctcaaacaaaagtcacttctaacaaggaattctatttgcagccaaaacatcaatatagcgtgatgacaaaatcaacaacagttttccttgacagtgcacctctccactgtcacacaggtggcctccagagacggagacattacccacgtgttcattcttgacaggaagatcaagttttctttcaggagcaccaagtctagagtccagctggttcctaaggcctgtctgcctctgccctaaggctgtggtgacagattagagctatctactcttggactgaaattccaccccttgggactcctcctcctcacctcataggagctgccatgatcctctggagccagggctgaggatttctggggtgaggtccaactagctggcatggccacactggatctcaaccctttttgtctagggtgcctgaagtttagtggtcatctgtgaactcagcagagctgctccgaagaggtgggctggagtctggaggaaggtctggcccagggactccccagagacacccaagaacctagaaaaacaatgtccacgtagtcattcaacattcactacataaacacttcctggatacaccaaggtgcaggtccctgcgctagaaaccagagcagtggttcccaaacgtaggtatgcattcaagtcacctggagggcttgttaaaacatagtttaaaattctcaacttcaccccttcgatgggtctaaggtaggccctaagaattttattttctaataagtgcccaggaaatgctgatgctgctggtacaagaaccacactttcagaactgtggagaacagtgctgaaatatgggaaaagccatgaaatttagagtaacattactgcagatttgaactgcagctgtaccacttttcaacaatgagaatataaagaagttactcagattttgtttcagaaataaggatgaaaatgcctgtgtcacagttactaagattaaatgagattatgcttttaaagtactcaatgcctccctgccatgcaagaatcacgcaataaatatcagcaattaccatgcactatattaaaacgtaatacagaaaaccatgtcatcaaaacaagtaagataataaacatatcagacaatgttgatctatatatgaaataaaaatgatatgcgattgagtgtgcacacggcattcattgtatacatatccccaattggtgcatgcaattggccatgcatctggaataaaacaaactagatctccacctcacacaatatttttttcttttaagatggggtctcgctctgtggccaggctggagtgcagtgacacaacctcatctcactgcaacctccacctccagagttcaagtgattctactgcctcagcctcccaagtagctgggactacaggcatgcgacaccacgcccagctaatttttgtatttttagtagagtcagggtttcaccatgttggctgggatgatcttgatctcctgaccttgtgatccgcctgcctcggcctcccaaagtgctgggattacaggcgtgagccaccgcgcccaacccacctcacactattaagtagacaaattccaggagcactaaacatttaaatacatgcattttttaaaacccctaaggatattaaaataattttcagactatatatttgtatagcattgtggtggggtgataaggatcttattacacatgacaggaaacccagaagctataacagaaaaaaacaggtatttctgattatgtttcctaattatatgtttaaataaaccataaaattcgacataaagatatataagaaattttttcaatatgtgatgatagcttgcttgtaatgttaactctaagcaatcactaagcaaaaaaggccaaaaaaaaaaataaaagaaactggaaaaggtatgaaaattcagagaaaaggaagcaaatggcaattaacaaaaagataccaacttaactaaaagaaaaacgcgtcagaacaattagagagaaattttccttagaatcataaaagctttaaaaaagtaacagaccaagcacaatggatcacttgaggccaggagttcgagaccagcctggccaacatggcgaaacgctgtctctactaaaaatacaaaaattagccaggcgtggtggcgggcacttgaaatcccagctactcaagaggctaagacaggagaatagcttgaaccagggaagcagaggttgcaatgagcggagatcacggcattgcactccagcctgggcgacagagcaagactctgtctcaaaaaaaaaagtgacaacatccactgttggaaagcatttaggcaaattgcttttataaattattggttgaagcttgaattgctataatgtcttttgagctatttagtcatatctatttttttatttttttgagatggagtttcactcttgtcgccccggctggagtgcaatggcatgatcttggctcactgcgacctccgcctcccaggttcaagtgattcttctgcctcagcctcccgagtagttgggattacaggcacccaccaccacacccagctaatttttgtatttttggttagaggtgtttttccatgttggccaggctggtctcgaactcctgacctcaggtgatctgcccaccttggccacccaaagtgctgggattacaggcgtgagccaccaggcccggtcagtcatatctagcaatacactcaactgatcccaataatatagttttaaatatataaagcagaaacagaagaaaggacaggtggacaaataacttttccaatgtgagtagtttaccttcctcaacaaaataatctgtgaggagatacataatatatataacatatgattaatatccataacaatacaaattagagaacatattacactcttttcatgtaatagatgtgacatttatgaaaaatgaggaagaactaggccataaagcaattgttcaactgaagcatcacctacagacactaattgaaacataaagtgcacttcttttttttttttttttttttggtgctctgtggcccaggctggagtgcagtggcaagatctgggctcaccgcaagctccgcctcccgggttcacgccattctcctgcctcagcctccagagtagctgggactacaggcgcccgccaccacgcccggctaattttttgtatttttagtagagacggggtttcaccgtgttagcaaggatggtctcgatctcctgacctcatgatccgcccgcctgggtctcccaaagtgctgggattacaggtttgagccaccgcgcccggccataaagtgcacttctaaacagctcatgggtcaaagaaaaacaattactgaaaaaaatttttaaacacttagatttgaacaatacgaaactgctacacatcaaaacttgttaatctttatattacaggctgaaatggaaagaactgaactttcaactcaggtcagaaagcaagctgatcacagtcctcaccgaccaccatagctgaccctacaggccctcagtcactgaccacagactcccgtcactgacccccaaaccccaatcactcatcccaaagagccccatcaatgacccgagaaatccctgtcacagacaaccatcaacggacgtcacagacccccatcaccatgccccgaaaccaccatcactaattccacagacaactcctctattactgacttcacagaatccctaattgcaaccaaccaaaatcgtcacagagacctctcggcattaaaacgtgaaaatagtcctgacgccagcggcgaaatagccttcggggaccacttccacttccggtccgacttctagcacctccccttatggactgttgatattgcgcatgctctaaattaacttggaagccaatttcagcccacagtcaacagggagcacacacatatttagagacatcgtgcagtttccgtaatcggcgctcacgggcagagaatataaccgcgcccttatggtgtttatttgtgtgggtcgccatctttgatgcgtatcgattccgtacagtggaggagtccgcctcctggagtgttgactagagtaaggcaaggattttcacatagaatgcaagactgtaaccagtgtgaccacgcttgtacccaagaagaagttcctgaagataggatctggagctttatgtttttttttgtttgtttgtttgttttgagacagagtcttgttctgtcgcccaggctggagtgcagtggcgccatctcggctcactgcaacctctgcctcccaggttcaagcgattctcctgcctctgcctcccgagtagctgggattacaggcaagcgccaccacacccagctaatttttttgtatttttagtagagacgcagtttcacgtctctactggtcacgctggtctcgaactcctgacctcaaatgatccacccaccacggcctcccaaaatgctggggttataggcgtgagccaccgcctccggctgttatatttacaatacctaagttaccccttggttacggcacactgcagaaaacaacgatttactaggagaaaccatgggggaactaggaagccagggatcctgagagaaataagggagataagaggaggcatcaggatggtacaatctattttttggagacaccactcaggagaagggtggactgggatctgagttcactcctgggtgaaaccactaggcaagacggagttatgtcacagtaggtagtatcctgcaggaagggaggtacaatttttagtagttgaaaacacattaggaaatagggtagaagttgggttagtacaatcctcttctaggagataccatggaagaggggttagaagtctaagcatcccctttgaaacggctggtagaaggctttgggaggtatagatattttaatccccttaatctccatcagcatccaccctagctaactcaagcacaactatagtaagcagcaacaataaaaataataatagtcttggctggtcgtggtggttcatgcctgtaatcccagcactttgggaggccgaggcgggcacatcaccttaggtggggagttcgagaccagcctgaccaacatggtgaaaccccgtctctactaaaaatacaaaattagctgggcatggtggtgtgtgcctataatcccagctacttggggggctgaggcaggagaatcgcttgaacccagaaggcggaggttgcagtgagccgagatcatgccattgcactctagcctgggcaacaagagcaaaactccatctcaaaacaacaacaacaacaacaacagcacaataataataataacagtctttaatatggccaacgtgtgactaaaaacacctgaagaaaatcttgctttttttttttttttttttttgagacagagtctcactctgtcacccaggctggagtgtaatggcacaatcatggctcactgcaaccttgactgcccaggctcaaaagcaatcccagctgggcgcagtggctcatgcctgtaatcccaacgcattgggaggccgaggcaggtggatcatgaggtcaagagatcgagaccatcctagccaacatggtgaaaccctgcctctactaaaaatacaaaaattagctgggtgtggtggcgtgcgcctgtagtaccagctacttgggaggctgaggcagtagaatcacttgaacccaggaggtggaggttgcagggagctgagatggagccactgcactccagcctggtgacagagtgagactccaaagaactgggattacaggcgtgagcctccgagcccggccagggagttttgtttttttttttttttgattgcaaagagatgttgaattttgtcaaatgctttttctgtttctattgagatgaccatatgatttttgtccttcattctgtcaatgtgatgtattgcacatactaatctgcatatgttaaaccatctttgcttccctgggataagtcccacttgatcattgtgtatctttttgacatgctattggatttggtttgctagtattttgttgaggatttttgcatctgcgtttatcagggatcttggcctgtagttttctctttcttctgtctttgcctggttttagtatgaggatggtgctggcctcacagaatcagtttggaaaaattccttccccttcaatttttttggattagtttgagaaatattagaatttgttctcccttaaaagtttggtagaatcaaatccaagaaggggatgatgagaacctctaattttcaggcaaactgggcagttgttggtaatcaggtgacctagtagttgtcattggcatctgaagaggtgggcagtcttgtgggactgagcaattaaactgtaaggtctgtgctaactcaggttagtgtcagaattgaattcaattgtaggacacccatgtagggagggctggagaagtggtgtcagaaaaactccacatattttgtgttaaaaacgaaacattctggaagtattgagtgttgtgagagtatatatttttaaaaccagtttgtttttcctatgcaactgtataaaaagacatatcaagtctcactccccccaccaccccaatcactataggttatcactataggtattgtttctggttcacgtttccaatacttcttttttcctatcttttctttttttagtgaatataaacaaatgcttatatctaatctaatttccttttcttttttagacgaactatatgttacactgttctatactttccattttttatatattccagagttaatgtcattccgtagagagcttcgtttttttttttttctgctgtgtgtgtatgggctgcataaaactttatgatgtgactgtggtgatttgagctgctacctttatcaaatactaagcatctatgtggatgttaatttcttttttttttgagatgaagtctcactctgtcaccaggctgtagcgcagtggcacaatctcagctcactgcaacctctgcctcccaggttcaagcgattctcctgcctcagcctcccgagtagctgggactacaggcgcgtgccaccacacccagctaatttttgtatttttagtagagacggggtttcatcatgttggccaggatggtctcgatctcttcacctcatgattcacccgccttggcctcccaaagtgctgggattacaggtgtgagccaccgtgcctggccgggatgttaatttctttctttctttctttttttgagacggagttttgctcctgttgcccaggctggagtgcagtggcttaatctcggctcactgcaacctccgcctcccaggttcaagcaattctcctgcctcagcctcctgagtagctgggatgacaggcgcatgccaccatgcccagcttattttttgtatttttagtagagatggggtttcatcatgttggccaggctggtctcgaactcctgacctcaggtgatccacccacctcggccacccaaagggctgggcgtgagccaccgcgcccggccatggatgtttatttctccatttcccatcctcctccctttgtctgtctctctaaccacacacaaatagcacactgttttaagtatagaggctttatcatgtacctcatataacttcatgtaacttcaattctactttctgtctctatgaatacacctattctaggcacctcatataagtggattcatacaatatttgtccttttggtctggcttatctcactccgcatagtgttgaaaaagaaaataaatggcttttatctgaggaatgcaagccttctttatgtgatcaagcccagagaggggttgggatgacacagctgttgtggtggctcatgcctgtaatcccagcactttgggaggcctcggtgggaggattacttgaggcccggagtttgaaactagactgggcaacataactaaaccctctctctataaatttttttttcaattagccaggtgtggtggtgtacaccaatagtcccagctactcagaaggcctaggcggaaggatgcttaagtccaggagtatgaggctgcagtgagctgtgatcatacctctgcattccagcctgggagacagagcaagaccttgtctctaaaaaaaaaaaaaaaaaaaaaaaatgctgggtgcagtggctcacacctgtaatcccagtacttcgggaggccaaggcaggcagatcacttgaggtcaggagttcaagaccagcctagccaacatgatgaaaccctgtctctacttaaaaaaaaaaaaaaaaaaaaaaaaaaaaaggaaagaaaaattagccgggcatggtggtgggtgcctgtaatctcagctactagggaggctgaggcaggagaatcacttgaacccaggaggcagacgttgcagtgagccgagatcccaccactgcactccagcttgggcaacagagggagaccccatctcaaaataaataaataaaaattaaaaaaataaattaaaaattaaaaaaaagaaatgagttttttctgctctaaaatcaaaagtttgcaagctgcattcctttctggaggctctggagaatttgttttttttcattttccaagttggagaagctgcctgcattcctcagctcatgggctcctttcatctttacacccaataatggctggtcgtgtgtttctcacagcacacaattccaacactgactttatgccttcttcctcatttcagaccccatgtgattacattgggtctaactggacaatccagtataattcccctatgttaaggtcagccgattagcaactttaattctacctgttaatttaattccacttgccatgtaacatagcatattcacaagtcccaggaactagcatgtgggtattttggggggaacattatcctgcctactttagatgttgaggtcattcaagaggaaaatgatagttttgttaacatgtgatgttagaacaactgaatttccatctggaaaataataactttgaacattacctcacatacacaaaaactaacttcaagtggatgatagaccaaaaataaaaactaaaactatacaacctttagaataaaacataggagaaattcttcacaacactagaggagtcaaagattgttagaaagaccagaaagcatgaagcacattttaaagatgagaaattggatttcatcagaagtaaaaactgctttttgaaagacatcatgaagaaactgagggctgggcacagtgactcacacctgtaataacacagtgagaccccatctccacaaaacacaagaaaattagttgggggtggtggtgcacacctgcagtcccagctactcaggaggatcgactaaacccaggaggtcaaggctgtggtgagctatgttaacaccactgcactccagactaggcaacagagcaagaccctgtctcaaaaaaaaaaaaaaaaaaaaactgagaaggtaagccccaggcagggagagaatatttgcaatttgcaatatgtatatttggcaaaggacttttacccaaacatataaagaattgttacaactcaataataaccaattttaaaataagaaaattttatttatttatttatttattattattttttgagatgcagttttgctcttgttgccctagctggagtgcaacagtgtgatctcagctcacagcaacctctgcctcccgggttcaagtgattctcctgcagggattacaggcatgcaccgccacgcctggccaatttcgtatttttagtagagacggtgtttctccacgttggtcagggtggtctcgaactcccaacctcaggtgatctgcccgcctcagcctcccaaagtgctaggattacaggcgtgagccactgcgcccagccgaatattttcaatagatgtcacaaaagaagataaaagaatggcaaataagtatatgaaagtatgctaagttcattgacatcaggaaatgcaaattaaaaacataatttgatactactgctcattccttagaatagtcaatagatgcctgatgtggggtttgggaggtggggattgacttaacaatgtggggggcagagggcggtgaataaaaatattctatatccgccgggcgcggtggctcacgcttgtaatctcagcactttgggaggccgaggcgagcggatcacgaagtcagaagttcgaggtcgggagttcgagaccagcctgtgagctcgaaccctgtctctactaaaaatacaaaaattagccaggcatggtggcgggcacctgtaataccagctactcggaaggctgaggcaggagaatcgcttgaacccgggaggcggaacttgcagtgagccgagatctcgccactgcagtccagcctgggtgacagctagactccaactcaaaaaaaaaaaaaaaaaaattctatatccagtaacactaaggataaatgcttgaggggatagacaccctattttacatgatatgattcttacgcattgcatgcctgtatcaaaacatctcatgtaccccatatacaactactatgtacccacaaaaatttaactaaaatgcttaaaaattttttaattttaaaaaatattctatatcctgattacgatggtggtgacaagggtttagacatgcgttgaagcttaccgaacagttcacttaaaatgagtgcattttattgtatctaaattattcttcagtaaagttgatttttaaaaaacatgcacacaaatataatttacaaactataacattagctcgtttatggtgtaccattcagtcacttttagtgtattcagagttgtgcaaacatcattatctaattcaagaagctttgcattaccccaaaaatgaaccctttagctattaccaatcactcacagttccccctaatcctgctagtcctaaaaaactctaacttactccttttccgtagatttgactattttaaatatttcctataaatgcagtcatacagtatgtggcttatccacggatgaaggcaaaaatgacgatttagtcagtctagcattctcagagagcgttataacgcctagtacagtccggggtcctgggtgcgttctgcactgagtcggcttggggcaggaagtcatttaagcgacctccttccacttgccccagcgcctcaccccttcctgctctagactacagttcccaaaaatccttgcggctctagtcaacatctggcccgaagctggcgaccttttcctgtttctcagggaactccctggggttggccggtaccatggaggaagattgtcttcagcgtgcagggccagcgtcctacggcagtttcactctgagcctgtgtctggatcacggagacgcggggtagcggttcggagtgcggagcagggatgtccccgagctgtgcagctgcaagaacccgaaaaaacaggcgccatcttctcggcgcggtcctactccggactgtatttcccagaggcccccgcgagtccagggcagccccttcatttgcctgctggaccctccgcctcaagggtaggggaagtgcgcggtgagcggcctgggtcttgcaggctcggctggggcccgcaggtacgtgcatgggagtttgaagggactgaccaggctggtctggagtgttgggcatgtatgagtgtgtcgggcatgtatgagttggtcgggctgatagagggggtggtggggaggcgggcgcgaggcgtgggcttccgtgtgtgagtgtgaccttatgtgactgtgcctctctgtgtgcgcgggtgtgattgtatatcctcgttgtagttgtgtaattgtaacaatgtaaggctgtatgtgtaggtatgactgtgtcccgtgttgggactgtgattgtgtgtggctgtgtaactttgcgtgacatttgtggagggtgtttgtgtggagagaatctgatgaggctgtgactgtgtgttagtctgaggggtgtgtgtaattgtgtttgtatgactgttagcagcacttaagtgtactggatgccttactgagtaaatctactacccagaaataacccagtaacgtgagaatgtgagagtgtgaccatgtaactttatgtagcactgtgtctgcggttggaaagtgcgtgtaatcgtgccggggtgatatgtgtgtcctagtggtcattgtgttattttgaatgtgtgattgtgtgtagtgctcaataggggtcctggggaggggggaactgtaactttgtgtggctcagtagtgcgtgtggtattgtgactatctgtagcactctggttctgaatggtgctatgtttgaggggtctgtaaatatgctagtgtaacttatcctcaaggtagatgtgggacaatgattgtgtgaccatatatagtgttattgtttgggtgaggcgtgcctgtggaggtctatgtgggtccccatggtggctgggtgactgcagcattgggtagggggtgcttgtgactgtctttgtgactccagctctccctgtgaggtcaggacagattctcgagaggagagacctcacccctctgataccaagaatgctcatgacagcctacacttctctgtttttgttttgttttgttttaaggcggagtttcgctgttgttgcccaggctggagtgcaatggcgcaatctcggctcaccgcaacctccgcctccccggttcaagcaattctcctgcctcagccttcctagtagctgggattacaggcgtgtgtcaccacgccctgctaattttgtattttcagtagagacggggtttctccgtgttggtcaggctggtctcgacctccccacctcaggtgatccgcctgccttggcctcctaaagtgctgggattacaggcgtgagccaccacgccgggccgcctacacttctctgacctcccccatcccttcttctctccatagatagtagctgtagatccaaaatgacctctgatctgctcagtctgggccacaagaaaggcctggcatctcatcattcctttcttcttcagctctgctctcgtcaagagagttacccagaggaagaatggctgttgaccaaaccaaatacaaggtgcattgggtttcctttttgcttctcttctctggatagtcgtggttaacatagagtcaacaagtgacctggttcttacaagtttctattcaagaaaatgatgagaagccttggagtggactcagagatcccagtagtctgttacttctttctacaaaatgttcacttattaatttagaaaatagaacagttttcccagtgtactaaagttttgtttttttaaacacacacacactctcccctcctctgtctcacacacacccacccacacaattccaaagaatttagaaaatagggagttacaaacagcaaatctactacccagaaataacccagtaatattttgatctatttccttctagtaagtttcctatgcacatatacattgttttcaagattggaatcttatgacatttaccatttcatatcttgtattttcactaaaaattatgtatggttcttatatttggttttcttttcttttctttttttttcttgagacggagtctcgctctgttgcccaggctggagtgcagaggcgcgttctcagcgcacccaggctggagtgcaatggctagatctcagctcactgcaacctcccgcctcccgagttcaagcaattctcccgctccagcctcctgagtagctgtgattacaggcacctgccatcatgcctggctaatttttatatttttgtagagatggagtttcactatgttggccaggctgttcttgaactcctgacctcaggtgaggcctcccaaagtgctgggtttacaggtgtgagccactgctcctggcctatatttgtttttttttttgttgttgtttaatccctttatattacgtaatacagaaaaatagttaaaatatagatgtatagtttaagaagtaattataaagagaccctcagcataacaaaaacttgcttcagcagtccagaaaagcccgctagtcctttccccagaataaacttatcctacctccctctttaggcaacacttatcctgactttgataatcgttattttcttcttgactttttaaaaaaagttttgttttgttttgttttttaccacatatctgcttatccctaaacaatatagtttagttttgcctttttaacactatataaattaaattgtactgtatgatgttgttttgagtcttgcctttcttataaaatactatatttgttagcctcactctcgctgctatacatagctgcagttcagacgttggttatttcctgtatgacagggctgctgtgaaaatgtttttacaagtataccagcatatatgcatacctttccaggatataagtgtatgaaggaattgctgggccatacagtatgttttgcatctttaaatttcctagataatgctgaactgatctacaatatagttttataaattaaattcctaccgacagcttataaacattatagtcatcttgtattctaacacatggtcatttggtattctaatctttaatgaatctgctgataccatgatatatcatgttgttttaaaagtataacatacattctggggccaggcatggtgactcatgcctgtaatcccagcactttgggaggcctactgggcagattgcttgagcccaggagtttgagacaagcctgggcaagatggtgaaaccccatctctacaaaaagtacaaaaattaaccaggcatggttacatgctgctattgtcccaggtattcaggggataaggtgggaggattgtttgaacctagggaggttgaggctgcagtgagctgcgattgcaccactgccttccatcctgggcaacagggcaagaccctgtctcaaatatatatatataccatacattctgaaaagtacaaaatcaaggtatatgacctgatgacttgtataaaagtgagcatattccgggctgggcgcggtggctcgtgcctgtaatcccagcactttgggaggccaaggcaggcagatcatgaggtcaggagatcaagaccatctggctacggtgaaaccccgtctctacttaaaaaaaaaaaaaaaatacaaaaaattagccgggcatggtggcggccgcctatagtcccagctacttgggaagctgaggcgggagaattgtgtgaacccgggaggtggagcttgcaatgagccaagattgtgccaccgcactccagcctggccgacagagcgagactctgtctcaaaaaaaaaaaaaaaaaagaaaaagcatattcctttgaccagatctcaaatctgataaggaaataaaacataactggcattacagaagcccaagtcttgtccagttcactcactacccacttctcctaaagagaactaatagtttgtcttctatagccatagactaattttacctatacttgaattttgcttggcttctttttttttcactttttttttcctactgtcagtttcacttggagatgatgcttggcttcttttgctcaatattgtatttcgtatgtaatatgaatgtattctgtaataatatgtagtataaatatataaaattcatccatgttgctgcacgttagttataggtgatataatgaatatagtgaacacattattattgctgtttaaaattctgttgtatgaatataacacttttttttgtttttgagacagtttcgctcttgttgcccaaggtggagtacaatggcaccatctctgctcaccacaacctccacctcctgggttcaagcgattctcctgcctcagcctctcaagtagctgagattacaggcgcacgccaccacacccagctaattttttgtatttttaatacaaacggggtttcaccatgttagccaggctggtctcaaactcctgacctcaggtgatccgcccgcctcggcctcccaaagtggtgggattacaggtgtgagccaccgtgcccggccgaatataacacattttacttatccattccattactgattggcatttgatttcatattgaggctgttatgaaaaacgctgccgggaacattcttttacatgtcttttggtgcacatatgaatgcatttgtcttgggtgtatttctaggagtgaaattgctgggtcatggtttctgtatatgttcagctctaatagatactgacagttttctgaaatagtggtatcaatctatattccaaactgcagtgtagactttatgacaagaatagattttacaacaagaagctttactagagataaagaggaatagtttataataaaaagatcaattcaccagtaagatataacagttctgaatttatatgccttcataaaatggcttcaaatatatttgacataactaaaagaagtagtagataaatcacaatcttagtggggagtttttagcactcttctcaatagctgacagaacaagtgacaaacccaataaagctatatggtatttgaacagtgtgattgacaagcttgacctgattgatatgtatagaacagtgtaccttacaactacataatatacttgcttttcaaatgcatatgagacatttatccaaattgatcatatgctgggccacaaagggagtctcaataaatttcaaaggaatgaaataatactgtaactttcctgaccacagtaggttaagctagaagtcaataacaagaagataattggaaatatcccagccaggtgtggtgactcatgcctgtaatcccagcactttaggaaaccgaggcaggaggattgcttgaacccagaagttttaggccaccctgggcaatatagcaagaccccatttctaaatttaaaaaaacaaaaattaaagaaatatcccaatgtttgggatttaagcaatgtatttataaataactggtgactcaaagaataaattgtgatagatatttaaaatattttaaactgagtgataatgaaaaataacataccaaaattatgtttctaaagctgaatatgaggaaaatatatagctgtaaatgcatatgttagaaaaaaatgaatgttggccgggcgcagtggctcacacctgtaatcccagcactttgggaggcccaggctggtggatcacgaggtcaggagttcaagactagcctggccaagatggtgaaaccccatctctactaaaaatacaaaaaaaagtagccaggtatggtggcgggcacctgtaatctcagctactcaggaggctgaggcagagagttgcttgaacctgggaggcagaggttgcagtgagccaagatcgcgccactgcactccagcctgggcggcagagtgaggctccatctcagaaaaaaaaaagaaaaaaattaatgttgaaaaattaatgatctatgtattcatctcaagaagctaaggaaaagtctagaaagttaaacccccaaaattaaaatctaggaaataataagaataaaagcccaaatataaaatttttagtttatttggtattgcatatatttaaggtgtacgtgttttgctgtacataacgaacatatattgaaatacaaaatgaatgtacagtgaagaaaactaacaaaggcaaaagcttatttttgggaattaataaaattaataaatctctaacaaaacttaaaatatgaagtaacacaaaaattgccaatatctgataagaggaaaattaaaccaaccacagacttaacttaaaggctgagggctcaattaattaattagtgtttggtacctgggacttggttccacaaaataagctcattggaatctgagccactgatcattatactgggtccctttttatacttcattgaacatgtagatttttctggttttttgtttttttctttttttgagagacgggcctctcactctgtcacccaggctggagtgcagtggtgcagtcacagctcactgcaaactcgaccttccaggctcaggtgattgtcccatcacagcctcccgggtagctgggactacagacaatgtgccaccatgcccagctagcttttttttttttttcaatgattttgttttcattttaattgtggtataaaagacaatgtaaaatttaccatcttaatctttgtttttttttttttagacggagtctcactctgttgcccaagctggagtgcagtggcatgatctcagctcactgcagcctctgctttccgggttcaagcgattctcttgcctcagcctcctgagtagctgggattacaggtgggtgccaccatgcctggctaatttttgtgtttttagtagagacggggtttcaccatattggtgaggctggtcttgaactcttgacctcgtgatcacctgccttggcctcccaaagtggtgggattacaggcatgagccactacgcctggccatcttaataattttttttttgagatgagttttgatcttgttgcccaggctgaagtgcaatggtgcgatcttggctcactgcaacctctgcctcccaggttcaagtgatctcctgcctcagcctcccgagtagctgggaatacaggcatgtgccaccaagcccaggtaattttgtatttttagtagagacagggtttctccatgttggtcaggctggtcccgaactcccgacctcaggtgatccacctgccttggcctcccaaagtgctgggattacaggtgtgaaccaccacaccaagctaatcatttttaaatgtacattccagtgttaagtatattcatattgtacaatagatctttagaactttttcatcttgcaaactgaattataactattaagctacaatgtcccatttccctctttccccagcccctggcagccactgttctactttctgtttctatgagtttgactaccttagatacctctgtaagtggaatcatttataatagtatttgtctttttgtgactggcttctttccagtcacaataccccaagatagaaaggggattcactgcagttagtcagtagacacacacaaacccaagtagtaacgggatacaatataataatgaattagttgaatgctttgataaattagtttgacatgttactttttattatcattcagtttaaattttttttttttttttgagaaggagtctcgctcttgtcaccaggctggagtgcaatggtgcgatctcaggtcactgcaacctccgcctcctgggttcaagcgattcccctgtctcagcctcccaagtagctgggactacaggcgcgcaccaccatgtctaactaacttttttttttttttttgtattttagtagagacggggtttcaccatgttgcccaggatggtctcgatctcctgacctcgtaaaatatttttaacttccattgcaatttattctttgaaccaccagttatttataaatacattgcttgaatccctgacttagcataatgtcctcagggttcaaacatgtagcatgtgacaggacttacttttttgtagttgtttatttgttttaatatgctttattttttagggtacttttaggttcacagtaaaattgagcagaaggtacagagatttcccatacacgtctttcccccacacgtatggtctcccccatcatcaacatcctccaccagagtggtacatttattacaactaatgaacccacatggacactcagagtctatagtttacattagggttcactcctggtgttacacatccaggggtttggacaaatgtgtaatgacatttatctccattatgatgtcatccacattaattccattgctctaaaaggcctctgtgccctgactgatcctccctccctgtcaactcctaatctttttattgtctccatagttttgccttttccagaatgttgtaatcatacagtatgtagtctttttgaattggcttctttcacttagcaatgtgcatttaagtttcctaagctgttgatcatgagactgagtccctttttatacttcaacagacatgtaagtttctatttttaatatagattttaatttttgtaagttcatttattggacaagatgtgtgctttaaatttttgcatggtgaaatctgcagtttcactataagatatattgacctggggtagtcgtatttttaaaatttatttatttattctttttttgagatgtagtcttgctctgttgccaggctagaatgcagtggtacgatctcagctcactgcaacctccgcctcctggtcctcctgcctcagcctcccaagtagctgcgactacaggcgtgcgtcaccatgcccagctaatttttgtatttttagtaaagacagaatttcaccatgttggccaggatggtcttgatctgttgacctcgtgatctgcccgcctcggcctcccaaagtgctgggattacaggcatgagccactgcacccagccaggctttttttttttttttttttttgagacagagcttcgctcttgttgcccaggctggagtgcaatggcgcaatctcggctcaccgcaacctccgcctcccaggttcaaacgattatcctgcctcagcctccctagtagctgggattacaggcatgtaccaccacgcccggctaattttgtatttttagtagagacggggtttctctgtgttggtcgggctggtcttgaactcccgacctcgggtgatcagcctgcctcggcctcccaaagtgctgggattacaggcatgagccaccgcgcccagccatccggccaggcattttttaaaaaacttaaatctcccttgttaatatcactatataattattaggggtttaatattgctaatagaatgtttacttcctaggcgataccagccctgcagggcctgtgggattttctctttgtgtgtggagacgagagattgtagaaataaagacccaagacagagatagaagaaaagacagctgggcctgagggaccactatcaccaagacacagagaccggtattggccccgaatgcctggtcgcgctgttatttattgtgtataaggcaaaggggcagggtatggagtgagagtcatctccagtgatcggtaaggtcgcgtgagtcacgtgtccaccagacagggggcccttccctatttggtagccgaggcagagagagagaggggacagtttacgtcataattttttaaatgtattttaaagactttagttttgttactgtcaaacaaaatttgtaactaattttgttactgttatttagaaggcagagccaggtgtacagggcggaacatgaaagcggaccaggagcgtgaccgctgaagcacagcatcacaggaagacaggcctctggatggctgtgggcgggcctgactaacgtcaggcgtttttacaagagatggtggagcagagtgttttttaactcccccagggaaagggagactccttttcccggtctgttaagtaacgggtgccttcccagttactggcgctaccgctagaccaaggtcggctaagtaacaggtgccttcccaggtactggcgttaccggtagaccaaggagccctctagtggcccagtctgggcataacagagggctcgcatttttgttttttggtcactttttatcgtgtccctttagtttttatctctgtactgtgttcctttagtttctatctctgtatggcttgggtttttttaggttataattgtagaacaaagattattattggaataaagagtaatgctacaaactaatgattaatatttatatataattataatttatttttagtataactatttttattctatatattttctttattatactaaaacagcttgtgcccttggtctcttcccttaacacctgggtggcttgccgcccagagtatgcaataagctctcatttggaacattcagctaatttgttattttattgtatcccatttctacttggttttgtgtgtgtctactaactgcagtgaatccccttttcatcttgggatattgtgtgaggccactgttgtgatgggtccttctggctttggtacagtttttcctttttctgggactaactggctttttcaaagttcccgagtttattctttttgtcttgggtagatggaaacaagccactaatactagaactataaaaaacaggataagaaaagaacacatatataatccttctctaattattgtatgtaaaaaaaaattattttattcgcccaccttttttgtgcactttataacaatttttttcttacatattattatggacttagagcatttcatagctatttcaactgactgatagctgttaaagactctatcacagtgtggaggagtggcagaagtattctgtttattgttgtgtaagttttcattagttggctaatgggatccccttttaggagactcttaaaaggagttctttcagcacagatatttttaaaaacagcctcaccttttggcaatggcaaaaggttgaattttttttttttttttttttttttgagacagagttttgctcttgttgcccaggctggagtgcaatggcgtgatctcggctcattgcagtctccacctcctgggttcaagtgattcttctgcctcagcctcccgagtagctaagattacgggcatgtgtcaccatgcatggctaattttgtattttttttttttagtagagacggtttctccatgttgatcaggctggtctcgaactcccgacctcaggtggtctacttgcctcagcctcccaaactgctgagattacaggctgtgagccactgcacccagcttttttttttttttttttgagtcagagtctcaccctgtcacccaggttggagtgcgatggcacaatctcagctcactgcaacctctgcctcccaggttcaagggatttttgtgcctcagcctcccaagtagctgggattacaagcatatatatatatgtgtgtgtgtgtgtgtgtatatatatatatatgtatatatatgtgtgtatatatatgtatgtatatgtgtgtgtatatatatgtatatatatatgtgtgtgtatatatatgtatatatatgtgtgtgtatatatgtatatatgtgtgtatatatgtatatatatgtgtgtgtatatatatatatatatttttttttttttttcaataaaacagagctagaagaattagtgcctgcatccctgtgtgtttaggggtggatgcgggtgttgtgtgtgtgcatgtggtgagtgaagttgactttttgagggttgagaaacaaaaagacttgattagggaagtctttggtctttctgatctgagtgcactgtgttcctggccaaagggcaccatttgtgtgagtctggtttggggacctgagggctgcaaaggaggtcatggtagctcagtcttgggtcatagtaggtcattagctcagggcagaccataatagctcaatcatgggttcagagcaacatcactgaggtgggacaaggtctggcccgaatccgttggctaaggcaggaacttaggttgtttgcatgagggagaatgaatctgagtccttgtcttgctgcagctaaagcctgaggtttgtaggattgaggaaggagtaggatttgttccatattcctactaactggagttgtatctcaagaccaagaaatatggaggtggttttatctgacctctagtgtgatttctagagggttttacttccccagtcatgcaacctcagaacactgtcctttttcaggagaacggcctcaaggaagactaaccatctgcaatactagaagccatggctgaggtgagttgatgctttttcttgccttcctgacatttagtttaaaaaaaaaaaaaagacatgagcatttgctttccttatcctgacatttctggctaacagagttccccttcagaatccttgtccccattttttcttagctagataatcctataccatctctaagtatcccttttatttttataaatcaaccagcattaatattttcattccgtaaatacctgagcatctctttttctgaactctttcccaaggactatgataggggatgaattatctcaaggaagcaagaatagatttgtaaaatgaagttaccctgtctggaccattatttgatgagttgaaggtgtgagttacttagctggaaatatagacaagccaagattatctctacagagtagcattctccagtaagataggatgaagtgtggtgctggtagttccaaatgttggattgttgcaagatctggtttaggcacctttggggatcatggggttggtggctgatacagagctctgcaactctgtaagaacatcctggagagaagtccaatttcaggttggataggaagtttggattgtaaggaatttctgtgaatcattgagttttctgtatctcagaattaaggatagtgataatggatgtttacaatggttcagccaatgcataagtcatgtggatcacactgtcagagctcagaagaaccttttaagtcttatccagtaatatctgtattgtagaaaattctaccagaaaaataattattaaagaatttgtaaaacgccaggtgcagtggctcatgcctgtaatctcagcactttgggaagcagaggcaggcggatcacctgaggtcaggagttagagactgggctggccaacatggtgaaaccccatctctactaaaaatacagaaaattagccaggtgtggtggcacattcctgtagtcccagctacttgggaggctgaggcaggagaatccttgaacctgggaggcagaaattgcagtgagccaagatcacaccactgtactccagcctgagcaacatctcaaaaaaataaaaataaataaaataactttacatataactttatatatctttttcgtagctttgattgatgctctaagatcacatgggggtagtttagaatatattagatgaaggacagctttggacataacacagaccaagagttgagaacttttgcatcaggcacaagcaaactgattatagttgtgttataccagatcatgtagctgctgtgtaacgtgaccttaaatagtcttcctgcataggacgagcaaaaggggatgattcatcaataggatagagatttaagacattctctggctaccccttgcattgttaggtgatgtcttttagcagaattatgaagacctttttctcccttaataaaggagaaaaactgatggcctgagaaatctttctctgcttttcaattttatgaattttttcagaagttataagactattactgaatttttacttatttgataaacattaactatttttgttttggtcagataaattattgacaaaactaattagtatttttttataagtaaaacattttccttttttcctcaaaaaggtttttttgttttttttttttgagacggagtctcactctgtcgcctaggctagagtgcagtggcacgatctcggctcactgcaacctccgcctcccaggttcaagcaattctctgcctcagcctctcgagtagctgtgaccacaggcccctgccaccacgcctggctaattttttcggttttagtagagactgggtttcatcatgttggccagactggtcttgaactcctgacctcgggatccacccaccttcgcaaagtgctgggattacaggtgtgagccaccatgcccggccaaaaatgtttttttcacgtaggtctatatagctaactggtagaccagagaattacctcatcttattttggttttataccaataaaatatatcttggatactcaataaataaatactcaaaaaataaaaaaataaggtcatgatgcataattttattaggatgcacatcgtatctggttctctttctttttgtaatattaccagttattgataatttttagattcattcactaggggttacaagtgatcttttaattctgtcattcttccttcatagattaagtggaatacgtctatctataaagtaaaactttccctcatcaattgtttggttaccctgaaggacagttcatataggaaagaagaatgtttgattctttccatttaattaccagttttccaaataatgagttggcttcttagacttgtccaaaagtgaccaataatgttttaaaatagtgttgtgaactcatggattaaacatttttaatatgatcagtccgttgcagttgtccatataatttgatgtgcaaccaatcctagtgaacacgtattattctcttttataatgctattgtattatattctcttattttttttttaatcctcttgatttctctgcagaaaatagggaaattcatcaaacacaatggaaagtttccttggaagattattatctagtcacacttgcatacagtcccctcttacagcattctacagtttgggattttgtttgtttgtttatttgtttttgtatttatttatttatttatttatttattgagatggagtcttgctctgtcgcccaggctggagtgcagtggtgatatctcagctcactgcaagctccgcctcctgggttcaagtgattctcctgcttcagcctcccgagcagctgggattacaggcgcgtgccaccacgcccagctaatttttttgtatttttagtagagacagggtttcactgtgttagccaggatggtcttgatctcctgacctcatgatctgcctgccttggcctcccaaagttctgggattacaggcgtgagccactgcgcccggctgtttttattttttttttgggatggagtcttgctctcttgcccaggctggagtgcagtggtgccatcttggctcactgcaacctccgcctcccaggttcaagcgattctgctgtctcagactcccgagtagctgggactacaggcgcacaccaccacaactggctaatttttgtatttttagtagagacagggtttcaccatgatggtcaaactggtcttgaactcctgacctcgtgatccgcccgcctcagcctcccaaagtgctgggattaccagtgtgagccaccacaccgggcctgggatttgtttttaatcctatgggaaatgtcctaatagggctttggcatatctttgttccaatttctacattgaggaggggaagaagctttctttttattaaataaaatacacatctttttatttttttaaaattttatttatttattttttcgagacggagtttcgcttttatcgcccaggctggagtgcaatggcgcaatctctgctcactgcaacctccacctcccaggttcaagcgattctcctgcctcagcctcccaagtagctgggattacaggcatgtgtcaccacgcccagctaattttgtatttttagtaaagacggggtttctccatgttggtcaggctggtcttgaactcctgacctcagatgatccacccacctcggcctcccaaagtgctgggattagaggcatcagccaccacgcacggcccacatctattttattaaataggtgcctcaagcattagttgctaatgaaacagaaatacaaatgaaacatctaaatatccaaataccacattttctctagatttcccccaaaatgtgcctcatctccctgtacttttacataatatttctagtatcttcattttgttagttttgcaatgtcactgtcaagatagaattatttgatggcttaagacaacttttattttattttattttattttttgagacagagtcttgctctgttgcccaggctggagtgcagtggcgcgatctcggctcagtgcaagctccgcctcccggattcacgccactctcctgcctcagcctcctgagtagctgaggactacaggcgcccgccaccacgcctggctaatttttttgtatttttagtagagacagggtttcaccgtgttagccaggatggtctcgatctcctgacctcgcgatcagcccgccttggcctcccaaaatgctgggattacaggcatgagccaccacgcccagccaacttttgtaagattttcaaactctaaatttataaatcctattacaaaaaaaaattataataatttgacgtgcaagttgtaacagtattggtcagtgggagtatcttcaagttgcctcctagtcttatcagcatgatcctaacagtttttggttgctttcttgctttttggtataacaagacgttcagactcatcctgtgcattttgtaaaagttgctcttgtggatttcgtgaaatcagttcttttcccaaagaaccttggtttcttttatttgaaaatgatatttagaaaccacaatctaggctgggtacagtggctcatgtcgtaatcccagcactttgagaggctgaggcgggcagatcacctgaggtcaggagttcgagaccagcctggccaacatggtgaaaccctgtctctacttaaaatacaaaaattagctaggtgtggtggtgcgtgcctgtaatccccgctactcgggaggctgaggcaggagaattgcttgaacccaggaggcggaggttgcggtgagccgacatcatgccactgcactctagtctgggtgacaaaagcgaatttctgtctcaaaaaaaaaaaaaaagaaaagaaatcacaatctagactctagggatgctcgttgctactggattagtcattatttctaggccgtttcaatggacagagtcaggaatttgtttaatataaacttcctactcttgcatctatttctgaaatctaaagatacaggttctcagtgacaccaatataatgactcattttgtattaccccacaatacaagcatcgtagtctctgatacatttttttaattacacaagtaatacgtatgtttattgtttcagggatcagtgatgttcagtgatgtgtccatagacttctctcaggaggagtgggactgcctggaccctgttcagagggacttatacagagatgtgatgttggagaactacggcaatctggtttcaatgggtaagggcatctgtaccagtgattcccagttctcctctggaatgtctccttcttccacagtgaatttctcagctgcttttcaggttactagctgaatttctattctttattaccaaacaaatggtttgagctgaaatgaaaaggaagagtgggaaattggcaactccagtgggctgtggttgaagcttcatcttcatctttctttggctgttcctgtagtggcatctcttcctgtgatcatcaagggactggatctcctttacccccagcataaccatgttccatatcttttctcgtgagcaggactttacactcctaagcctcaagtgatctccttattggaacaagggaaagagccctggatggttggcagagagcttacaagaggcctgtgttcaggtaagtgagaaatgaccggacaggagaaagtcacgataggtcagaactcagctggtcagggaggaaacagcacctttgagatgttatccctgaagctcccatcaagaaactaggccagtggagaaaatgaagtccttttagcatagttgttaaataacctgtttcgcccttttcctcacttaccactatttctactactcctctccaatcctcctcttaatttcaagcagaaggtaccttttacttctctaaaaaaaaccctattttacccgtattttagattcagctgcttgctagctttttttactctctctctttttttttctttttttttaaagggtctggctctgtcacccaggctagagtgcagtgacatgatcataacttattgtaggctcaaacttctgggcttaggcagtctccctgcctcagccttccaagtggctgggaccgtaggcctgtgccaccatgcctggctaattctttttcttcttctgcatttttttttttttttgagacggagtctcgctccgtcgctcaggctggagtgcagggtgcgatcttggttcactgcaacctctgcctcccgggttcaggcgattcttctgcctcagcctcctgagtagctgggactacaggcgcatgccaccatgcccagctaatttttgtatttttagtagaggtggggtttcaccatattggccaggctgttcttgaactcctgacctcatgatctacccgcctcagcctcccaaagtgctgggattacaggcatgagccaccgcgtccggcccctcttctgcattttttagacttgtacaggtgttttctactaccactccccaaaataatataattgcgtctgtatacacacatgtgaacacacacacacacacacacacacacacacacacacacacagagacacacacacacacaccccttgcccaagtactggtcttcattatagctgcctgtcagtgacctgttttatcagactgtcttcaatgtttcctttatggaacgttttttaatttcctggtttgtgtaagggaatcttccaggtgctacagtttactaattgtgttacctttacaaattcaaggtccaaaagtggtgctaaaatatatacatatatgacttccacaaagtagagtagtataaaagagaaatgagataaggagtttagcagaaagtcaaaggctaactatgtagaagtggaattaatccctattgaagtagtaggtggagccttggaagtgactgcaatcactatgtatagagatattgttggggccaagaaaaaaaaaggatctgtgcctatattaaaaaggaagaggtggcagagcaggagagatttgggatgaagtaggagaaccagaagagtacttattgagcactactatgtaccaagcattggtccaagggctgggactgtagtattcatgaaggcattctaaagttctgcacttctgaagcctacattctagagggtaagagagaaaatgtcttagtccattttgtgctgttacagcagaatacctcacatcgagtaatttataaagaacagacatttattttctcatagatctggaggctaagaattctaagatcaaggcactgtcatctgatgagggccttcttgcatcttcgtgtggcagaaggcagtagggcaagagagccaactccttccatcaagccccttcgtaagagcaccgaaacccatccttgagggatgggtccttgaagcccgatcatctcttaaaggcctcacctcttcgtttttggaattttttttttttttttgagacagggtctcactctgtcacccaggctggagtgcagcggcacaatcatggctcaccacagcctcaacctcccgggctcaggtgatcctcccacctcagcctcccgagtagctcggcccacaggcacacgtcaccacgcccagctaatttttctattttttgtagagacagggtttcgccatgttgcccaggctggtctctaactcctgggttcaagcgatccacccaccttggcctcccaaagtgctaggattaaaggcttgagccactgtgtctggcccccacctcttaatactatcacattggcaacagctgaattttgaaggagagacattcaaaccatagcagaagataaacatgaatgtcaagtatatatgtataaaacaatattagcatgacattaatattatatgatatataaatatttttagaattatatatcacttacatttatctacatgtaactaatatattggtatagtataaatatatatcatatattaataatatttctatattattatatgtccatgtgtatatgaaatgtcaggtggtgggtgatagataagtgctgtgaagagaggctagagagggcctctctgatgaggtgttcttttagtgaagacttgaaggaagtgagggaacaggtaatgtaaatatctgctaggagagattcaggcaaagggaacaggaagagccaagtactcgagttcagagctttttggcagccaccattatggctgaaattgaatgagcaaagcgggaattgtagaagaggagatcaggaaagtagcaggcttatgagtgtttgcatgctgggtgcaggtcaggatgggagttggatgtacctgtagatgattttgggtcttgtggaccttgaattttactccgaatgaggtgtaaatccattgaatgatttagcagagtgatattatcatgtttgcaaaggatcattcttgctctaggggttcctaactttggattcctttaggtagaattcagggagtccatgaacttggatgagaagaaaaaaatacatctttttggttttttttgagacggagtctcactctgtcacccaggcttgagtgcagtggtgtgatctcagctcactgtagcctccaccccgcaggttcaagcgattctactgcctcagccttctgagtagctgggattataggcgcctgccactgcgcccggctcatttttgtatttttagtagagatggggtttcaccatctttgccaggctggtcttgaacttgtgacctcatgatccacctgccttggtctcccaaagtgctgggattacaggcatgaaccactgtgcccagaccaaaaatacatctttatatttaataacctctaattgagatataacatttcttcctatcgtgatgtatgggacaaaccatagtagcagtagtagtagtagtagttactgtgactttgacattaatggaaatcacagatacgttcatattattttactgttattgtaggcatattgaaatatttatgctcatcactacttcagaattaatgtagtactaggcttgccactaggtcttgtttaatgttttactagagaagaaaactccaggcagagagaagaacccctgtgaaggttctgatggggaaaagcttggtgtgtttgaaggactaaatgccagtgttggtgggccccatgatcaagtgggagtggagtgtgagtcagggtttggatagacaggcaggagccacagcattcagcctttgcaggagattgtaaggagttcggactttgagcagtggaaacctaagccaaatgatactattccctgaatagattaaagggtgagagagcttggtggggagactggttgaggaggctacttcactggtctgggtaagagttgattctggtttggaagatgacattggcagtggaagacagaagagggcagtttcaaaactttacttgggagcttaactagatgaaagttactgcaagatctgccgggcgcagtggctcacgcctgtaatcccagcactttgggaggccgaggcgggaggatcatgaggtcaggagattgagaccatcctggccaacatggtgaaaccccatctttcctaaaatacaaaaaaattagccgggcgtggtggtgcacgcctgtagtcccagctacttgggagactgaggcaggggaatcgcttgaaccctggaggtgtaggttgcagtgagccgagatcacaccactgcactccagcctggcaacagagtgacactgcgtttcaaaaaaaaaaaaaaagttattgcaagagcatatagagataggaggagaaagattgtgttggaatgaattccctgttcctgttttgagatactccaataggcttcattttgatatcttcaaaccatttaatttgcctaatatccccatttttagtaagaaattgtttcataatacctgaacactttactccaaaacatgtatatacattttcctgtaaccccccagtaatcatgagttaaggattattgcccttttacagatgaagaaatggtagcttagagattaaataattgcttgtgagcacacaacgattaagtatcagaattggcagtcagctctcatcaatctgcttctggttcctgttatctttctatggcagtatgttgtactgtgtcttagtttctttccatcttccttaaactttagctccttctctctcattcactgtggtggtacataagcaagtctcctctcccctaagatcagcatctcaaaattccaaggcaaacaatatttccattgaatccccagcacataaaataattctgagttttcctatctgccacttacacacctacatcaaattagttcaatacattagacttacatctgtctcttccctcatgtgaataacccgctgttaccaattcctttttttttgttgttttgagatggagtctcactctgtcacccaggtggagtgcagtggtgcgatctcagctcacggcagcctctgcctcctgggttcaagcagttcttctgcctcagcctccggagtagctgggattacaggcacgtgccaccatgcctggctaatttttgtatttttagtagagacagggtttcaccatgctggccaggctggtctggagctcctgacctcaggtgatctgcccgcctcgtcctcccaaagtgctgggattacaggtgtgagccaccatgcccagccaccacattcaaattgtatccactgtatcctttattaaagaccttattctgtttccaccccaactgggtttgctgcagttcacttctgacactattcaggatgtggagacctcacagtcttccatagtactgtcctcacctcagatgccagctgcaagtcttgggagtcccccggctacctgcaggtcagccagctaacagcaataaattaaggggtttccaaggtctcaggttcaataatttgttagaatgactcatagaaatcaggaaagctctgtatttaaagctacagttttattaggatacatatttgagcaagatctggaactggacagtttccatgccctctccctgtggagtcagtttgtcactctcctatcacatcagtgcatttaccaaccagaaagctccactgaatttactgcccagcatttttattgaggttttattacacaggcacaattgattaaatctgtgccactcaatctctagcctctctacacttctcagaggtcaagcagctgcaagtcccacccttgtaatcacaagctagtgtttctggtaatcagaccccaccctgaagctttctaaggtcctaccatgaattaccttattagcataacaaagacctcctgtcaggaaattccaagtgtttttgaagctcagtgtggggctttattatacctcagagccaaagaatcttccccatatgcatttatttctctcaggagacctttaatggaggctagaaaatgatccacttcatgttacacatattgtatgatatacttatctcttatgtacacacgcatacttatatagatatatgtatatcatatatatctatataagtatatatatactatatagtatgtctatatatactatataaatatatatacttatctatatatactataaagatactatatatagtatagatactatatatactatatagatactatatatagtatagatactatactatatatagtatagtatctatatatactataaaagtatacttatgtacatatatatggccagtcatgttttaatatggaaaatagcccaaccattgtatatttaccagcctttccagttgattctgatccacatccatatttgagtatcattgtagtaacttatttgcgtagttaccttcctctgcttcctgcattatcttactaatttctttgtctttcttgtccattttttcagataacacagatatccttgtgaaccctgtgtcatttacctagtagatactattcttactttaatttttccatttctattataaaagtttaatttttcacaaataggaaaaaagaacatttaccattttattttctttcagatctggaatcgatgtgtgaaaccaagttattatctctaaagaaggaagtttatgaaatagaattatgccagagggagataatgggacttacaaagcatggccttgagtactccagttttggagatgttttggaatatagaagccaccttgcaaaacaactgggatatccaaatgggcattttagtcaagaaatattcactcctgaatacatgcccacatttattcaacagacattccttactctccatcaaataattaataatgaagacagaccctatgaatgtaagaaatgtggaaaggcctttagtcagaactcacaatttattcaacatcagagaattcatattggtgaaaaatcttatgaatgtaaagagtgtgggaaattctttagttgtggttcacatgttactcggcatctgaaaattcatactggcgaaaaaccctttgaatgtaaggaatgtggaaaggccttcagttgtagctcatacctttctcaacatcagagaatccataccggtaagaaaccctatgaatgtaaggaatgtgggaaggcctttagttattgctcaaatcttattgaccatcagcgaattcacactggtgaaaaaccttatgaatgtaaagtatgtgggaaagcctttactaagagctcacaactttttcagcatgcacgaattcatacaggtgagaaaccctatgaatgtaaggaatgtggcaaagcctttacccagagctcaaagcttgttcaacatcagagaattcatactggtgagaaaccctatgagtgcaaggaatgtggcaaagcctttagtagtggctcagcacttactaatcatcagagaattcacactggtgagaaaccctatgattgtaaggaatgtggaaaggcttttactcagagctcacagcttcgtcaacatcagagaattcacgctggtgagaaaccctttgaatgtcttgaatgtgggaaggcctttactcagaactcacaacttttccagcatcagagaattcatacagatgaaaaaccatatgaatgtaatgaatgtggaaaggcctttaataaatgctcaaaccttactcgacatctgagaattcacactggtgaaaagccctataactgtaaggaatgtgggaaggcttttagtagtggctcggatctcattcgtcatcagggaattcatactaataaataataaaaattaaagcccctgtcaccttcctcatattttaaaccaaaaatcatgtctaatagttaccctcttccgtagttttttttaaaactttgtatttaaattttgtatccaaatgtatttcattccaggttataaattcggagtctaaagtgacattccctctctcccccagtcatataccgatgccagctgttctataattctttcattcattgttttgttctactttcttggtgacacattatactcatgtttatatttgcttgtgtttttagagctatcttttctgatctgtgtatttgtgtttgcaccagtatcacactgtttgaattgtgtgacctttaatatttttaaattccttgtggaggtttaactttgtttttgaagttagtgttagtctttttgttttattttattattattattatatgttttttgagacggagtttcactctgttgcccaggctggagtgcagtggcgcaatctcggctcgctgcaacctccacctcccggcttcaagcaattctcctgcctcagactcctgagtagctgggatcacaggcgtgtgccaccacaccctgctaattttctatttttagtagagacagggtttctccatgttggtcaggatagtcttgaactcctgacctcaggtgatccacctgcctcagcctcccaaagtgctgggattacaggcatgagcgattgcacctggctttattttttgttgagacggagtttcgctcttgttgcctaggctggagtgcaatggtgcaatctcggctcgtcacaaccttcgcctcccaggttcaagtggttcttctgcctcagccttttgagtagttgggattacaggcatgtgccacaacacccggctaattttttgtatttttagtagagacggggtttcaccatgttagccaggatggtctcaatctcccgacttcaggtgatccacccgcctcggcctccgaaagtgctgggattacaggcgtgagccactgcggccggtctttttattttacaaatgtacatttttaattgttaagccaaaatcacaaagcaaaaaattacaaactaaaaagccaaaattaattgtaatcatacttatagatggctgctctcaatttggtagagaaaatcgtgctatactttgcttttttaagaaagtgtaattatgatatgcatgctgtacccttaactgcttttatcatgccaaagatttcatgagtgccatttcagtaaatatagatttttattattttcatgacatatttaatgactttaaaatgactattcccattatggttgccactaaatttttgcagctataaaagctgacctcggctgggcacagtggctcatgcctgtaatcccagcactttgggaggccgaggtgggcggatcacaaggtctgaagattaaggccatcctggctaacagtgaaaccccgtctctacttagctgggcgtggtggcatgtacctgtaatcccagctactcgggaggctgagacaggagaattgcttgaacctgggaggcggaggttgcagtgagctgagatggtgccactgcactccagcctgggggacagagtgagattccgtctcaaaaaaacacaaaaactgctgacctcattggatgcttatttttacttttaaaacatttattttaattgctaaaattatctacattttctccttgtgagctgttttgttcccttacatcaatcctaatcccaatgccatactagaaagtaacactgttatgaaagtgttatttatcaatccagatattaattttttgtttgtttgtttttttttttttttgagatggagttcactctgttgcccaggctgaagtgcagtggcacaatctcagttcaccacaactgctgcctcccgggttcaagcgattctcctgcctcagccttcctagtatctgagactacaggcgcacgacaccatgcctggctaatttttgtatttttagtagagacagggtttcactatgttggccaggctggtcttgaactcttgaccttgtgatccacccacctcggcctcccaaagttcggggattacaggtgtgagccactgtgcccggtcaattattttttcttatagctattagtggtgtttttgttttttgagacacagtctcgctctgttgcccaggctggagggcagtggtgcaatctcggctcactgcaacctctgcctcccgagttcaagtgagtcttccgcctcagcctcccgagtagctgggactacaggcgcgcgccaccatgcctagctaatttttgtattattagtagagatggggtttcaccatattggccaggctgctctcaaactcctgacctcgtgatcctcctgccttggcttcccaaagtgctgggattataggtgtgagccaccgcccctggctgttagtggtattttaaaaaattatgtctaggcatctataataaggctgtatgtattggattgctgtgaagagtcaatgaattaataaatgcaaagtacctcaaactgttatcacataatacaggtttagtaaaagttttccactattatcagtgatatactcattatcataagtatcttcattaggatttatggaaaggattttaaccatgttgtttacctttggcaaatttgtaattcatggtggaaaaagagaaacacttgtaatgagtataacgaagcctttccctatcattattattcagtgtggaattttaaaaggaagagaaaaagtatgtgtgcatagtctttgttcagactttatcttttatgctacataaagaataccagtctgaggctgggcgcggtggctcacacctgtaatcctagcactttgggaggccaaggtgggtggatcacttgaggtcaggagctcgagaccagcctggccaacatggtgaaaccccgtctctactaaaaatacaaaaaaaacaaaaacaaaaacaaatagccaggcatggtgttgcatgcctgtaatcctagctactcaagaggctgaggtgggaggattgcttgaacctgggagttggaggttatagtgagctgagattgcaccactgcacactccagactgggtgacagagcgagactctgtcttacaaaataaaaaataaacggttaccaatctgaaaccctgaaaatatgatgagtagtagaaagcacagctgtcaaaaaagcaggaagagattataaaattttttctaatatttccccccaaaatgcagaaaacatactggcaacattatttgaccagaagaagcagtacaataggataaccatcaaatatctgattattaattcaatattccctcttaattaacatgggttaaggaataaatccctaatatatacattatttaaatgtacatgaaaatgaaaacaattgaaaaacctgtgagtggcagtaaaagttgtattggaagttttataacctaatatttgtgcatatattgtaatactaggaagaaaaaatatagaacccaaggaactaaaacaagctgaaatgaattgtgggaggaaggaggtagtattattttaaaaggcagaaataattgaaagaaaaaaactggatctgaatccaaaattgatatttgatggaagagaaaaaaaatgagacaaagtttagtgattccagaggtgaaataaggatgacaaataaacaatattgtatatgagaaattgaaatggctatatatgtaaacttaaaagaactgtgtcatttggggtaatgaaaatgtggcatgggtaaaggttgtacaattttgtttatatactacaggtcactcaactatacactttaaaagggtgaatattatgctgtgtgaatttgatctcaatttaaaaacttaaggctggttgcagtggctcatgcctgtaattccagcactttgggaggctgaggtaggagaatggcttgaggccaggagttcaagaccagtctaggtaacataatgagatccccctcccctcatctctacagaaaaaaaaaaaaattaaaacaacaaacttaaaagttggtattatagacatttttataatatatctgaaaatctggaaaaagtctgtgatttttaataagttgacgacatcagaattaactggaggtgtaaaatcttaatagacctccctccagaataaacttatttaaaaaaataagactggccaggcatggtggctcacgcctgtaatctcagcattctgtgaggccaaggcgggtggatcacctgaggtcggggatttgagaccagcctgaccaacatggagaaaccctgtctctactaaaaatacaaaaaattagccgggcgtggtggctcatgcctgtaatcccggctactcaggaggctgaggcaggagaaaggcttgaacccgggaggcagagattgcggtgagcggggatcatgccattgcactccagcctgggcaacaagagtgaaactctctcaaaaataaataagtgaaataaaatttttcttaaaatatattttaaatgtcaaattgctacactaaaaaagacaccaaggtagagatttttataggtgaaatctatgaaatgtcttaggaaactcttctaggacatagactgagatagcaaattatctatttttaaaatttgtcataatcctgatgttacaacctactagaacccaaaacaatttgtccagaatcagttatgaaaatacagcattataaattagcaaatcaaatctagtaacccattgaaaataaatatttgtcacattctgaatttaggaaaaaacaattctgataaatcaaactttctactttctgaaacttgaaaatcaaattgatttagataagattgtatttcttagtgtctgaactcaggaaccaaatagatgtggatagcatgggatttttggaatacaagataagataatttacatgggattgcaaaagttcaaataactaaagttctgtcaatgaaaatatatgctctaacctcaacatcttctagatgaacccttttttctagcagtatttgacaggatgggatatattttataaataaacttggactattatcctatctgctgcagtatcactgttcattcatttatgccctttacttcctacttgaagggtctttaaacatagccaacatatccaatcattgctgtgcattttggatgagggtggattgcggggctgcattcaaagccatcctgggccacatgcagcctatggagcgtgggttggatgagcttgatgtaccacgttttctttatccagtctaccattgatgggcacctgggttgattccccatcattgctattgtgaatagtgctgcgatcaacatacaagtgcatttgtctttttggtagaatgatttcttttcttttgggtagatacacagtaatgggattgctgggtcaaatggtagctctgttttaagttctctgagaaatctccaggctgcttttcacactggctggactattttatgctctcaccaacagtgtataagcattctcttttctccgcagcctcaccagcatcagttgttttttgactttttgtttgagacagagtctcgctgtgtcacccaggctggagtacagtggcatgatcttggctaactgcaacctccgcctgttgggctcaaacaattctcccactttggcgtcccaagtacctgggattacaggtacatgccaccgcacccacctaatttttgtattttttgtacagatgtggtttcaccatgttgcctaggctggtctcaaactcctgggttcaagcaatcccctaccttggcctcccaaactgctaggattacaggagtgagccacggcacccagcttatatttgtgtatatgttaaattgtatatgttattttatgtatgtgtatatattaagttgtagattcacatatataattatatacacatatattacattatatgcacatatatttgtttactcgtgcaatttgtcccagcagaagtaaaaactcatataagtaaaataatatttacaggccaggcgtggtggctcacatctgtaatcccagcactttgggaggctgaggcgggaggatcacctgaagtcaggagtttgagaccagtctggccaacatggtgaaaccccgtctctactaaaaatacaaaaattagccgggtgtggtggcgcatgcttgtaatcccagctactcaggaggctaaggcaggagaatcgcttgaacccgggaggcagggtttgcagtaagccaagatcacaccattgcactccagcctggggtacaagagtgaaactccatctcaaaaaaaaaaaaaagtattatttttggtgcaaaagtactttaacatcttaaatgctcatataatggaagatactttaactcttagaaagaatgagttagctccctttctactctaaaggtatcctaatatctttgtacctgaagtggtgtctgattcaaattgttatattaaaaaaggaaaatgctttataataataataataataaaagaaactttatatagtagccctcccttatctgcaggagatgtgttctaagacccgcagaggatgtatgaaaccgtggatagtatgacccaattgctgtcgatcagaacacatttctgtttatgttttccaagcacaaatttaatgttttttttttttaatcttaactaagcacttatcacacgtggctgtattttttagagcttggggttcaacaaacaagactagcagaaatttcttttcctccttacactttcacagctagaagatttgttcttaccatagatcttagcaacctcagcacacgacttattttccttattcagtcaagaattttcacattttcacttaaaggaaacactttagggctcctcttctgcatatctaaattgacagcatcactactcttgcattttagggccatcattaggtacaattagcgtcacttaaacacaagcgctgtgatactgcggcagtcagtctgataaccaagttggctactcaccgactaagggtagcgcatacagcgtgcatctgctgaacaaaggggtgttcatatcccaggcagaataaagcaggacagtgagatatttcatcacgctcctcagaacagcccacaatttaaagcttatgaattgtttctttcgggaatcttgcatttaatattttcagaccacaatttactgtgggtaaccgaaactgtgggaagtagaaccatgaataaagggggactactgtatatgcttctgtatgtgtgtaaatacttacatgaatcgtggagaacataatgggaagatgctcatcatcttgttaactcgttatttcaagagtggaactggagggggaatactgcctttcctttatatttatttgtaatatttcattttcattatgaacatgtgttattttagtatttttaaatattaataaagacaggcaaaaacatgtaattttaattcaaggtgaaatcttcaaggcaatcatatataattaaacagagcaaataaaacattctaaatccttgaagggaaaggggaaaagaaagcacaatgtaaaaaccaagtgaatctaaacgcaacaatatatcataatgcctaagttcgtgggaccaattccaatccagtccaaggaagcagagactggcgagcaacattccctttcaggcccctgcagggtcaagagcatgctcctggaatagactgagaaactagggcaggctaagtgaggtgccaggaataaagacaccgcctgactgacacattctccactctccctacacccgctcctctcaccagcgcttccatcaggctccaattcctccctcttcccaagagcctcagattgaaaccttgcaaggaagacacccattctcaaagtcacaggcttggtaatctgagcggcaaaggtgaatgatctcgtgctccccctaatccccactactcccctcgccactgctgcctagcaccagcccctcctccataatttgaactgtcctcccaggacttggaggcgggtcggcccaagcacttcttactggccaacatggagcaaacctcccctctcttgcacatccattggctaaaagatctgtctacttaagtctgactgccaccttcccttctttctgtgctgcctggataggactgtcagctggtcgcgtttcccattggtcaccgtttccggaagcccgcccccacgtttccgggagcccggcggacgctgggtctgcagatgccatccaggcgcacggcgggtatagtggttccgcaaccttgggatgttcggctgagcgcctgcctaacatgggagcgcctgcctaaccctcctgactggagggtcagcggcggggagtcctggccttcaatcggccatcgccacggcagaaactggggcccgggctgcgtccaggcccttccccgtccgtccacaggtctcatgggcgcccggactggggctgatgtagtttcccgacctctgacacataggatctggagattaaaggtataaaaacggggacttttcagcccactcaagtaaaacacccttttatttttcggcaggtgttttgttgcagaatgccctgaggggagggagtgactgctgggtttcggtttataaaataaaataaactcctgatttagattatgtttaatatggctccccaacctttaaaaatcccactttttgccagttgtattatttagtgggatgttgaaggggggggcctgcgcctccacacctgtgggcgtttctcctcaggtgggatgaaagactgagaaaagaaaaagacacagagacaaagtatacagaaagaaaagtgggcccaggggaccagcgctcagcatatggaggacctgcgccagcactggtctctgagttccctcagtatttattgatcattatttttaccatctcagagagggggatgtggcaggacagtagggtaatagtggggagagggtcagcaggaaaacatgtgaacaaaggtctgtcataaacaaggttaagaaaaggtgctgtgctttggtgtgcgcgtacgcaaacatctcggtgcattaaagagcagtattgctgccagcgtgtctcacctccagccttaaggcagttttcacctatctcagtaaatagaacatacaatcgggttttacacggagacattccattgcccagggatgagcaggagacagatgccttcctcttacctcaactgcaaagatgccctcctctttcactaatcctcctcagcacagaccctttatgggtgtccggctgggggatggtcaggtctttccctttgctctgttaccaggctggagtgcagtggcacaatctccactcactgcaatttctacctcccagattcaagtgattctcttacttcagcctcctgagtagctgggattacaggcgcgtgtcaccacgcccagctaatttttgtatttttagtagagatggggtttcaccatgttggccaggatgatctcgatctcttgacctcatgatttgcccgcctcggcctcccaaagtgggttttgattttttttatagtggtaatgattctgtcttcttaactcctttaaaatcttagtcagtgggctgggcgctgtggctcatgcctgtaatcctagcactttgggaggccgaggcgggtggatcacttgaggtcaggtgtctgagaccagcctggccaagatggtgaaaccccatctctactaaaaatacaaaaattagccgggcgtggtggcgggcacctgtaatcccagctacccaggaggctgaggcacgagaatcacttgaacctgggaggtggaggtttcattgagccgagattgtgccactgcactccagcctgggcatagagcaagactcagtctaaaaatatatatatatatatatatatatatatatatatgttggtggatctcttactttcacaggatttatttcatagtgtgaatgagacacctcctataggctccaggttgctaacttcatgaggtgtgaagattcggtgctttataaaacagcccccacattcttcataggcctgtccttaattctcagcacccctctgcttctgacattgtacctaaaattaagttttttgtggttatatgagagctctggaaatgcccagcattagccactaatgtttccgtttgatatttccccatatcttaatagtgaccctcaatccattactcagatgggtgtccttttcttggatgtctggaaactaataccagctatccctgtgacctccctgctgagccaccattttgtcttttctcttttcttgtctacaattgtgttcgtaaccctcagctctttcatgagcagccttgatgctttcgactgcttctaactctgagtttattacccgcagtttccatgagccaagtttaggggcctgtgagaccgtcccatgtaaattttcacattcctctaaccaaaatgtagtgtttccttccatccagaatgtaggccgtagaccccgtgggtatggggcattgttaacagtgagaccacagcagtttttatgtcatctgacagcatctccaaatagccttcatggttgtcactgcttcccaatgacaattccaaataacagttcccagtgatgacttgctacttgatattgttacttaatatgttaaggtggctgttgtaggcactattactgtgtaagaaattacaccaaaatttagtggctcaacacaatcattatgtttgtggattctcatgctcatggtcaagatttcagacagggcacaagagtggcctgctgtctctgtccatgatgtctggcttcagcacggaagactcaacagctgggggctggaaccatttggaggcttgttcccttatatctgatacctggcttgggatgttggaagatggggctcagctgggactgagtgcctacatgtagtgtttccatgtggccttgacttccttacagcctggcagtctcagggtagtcagaattcttaggtggcacaggttcccagggcagatgctgagtggtcttttatgaggtaacacaacaaatccacccaggatcggggagacaggacatcgattctgcctctcaaagggaggagtggccattttttaaaaattgccacagcaacatgcctattaatatatcagaaaaatttgaagtatcctgatagctgcatttctttttttttttttttttttaaacggagtctctctctgtcatccaggctggaggagtgcagtagcacgatctcggctcattgcaacctccgcctcccgggttcaaacgattctcctgcctcagcctcctgagtagctgggactataggcacacgtcaccatgcccagctacttttgtatttttagtagagacagggtttcactatgttggccaggatggtctcgatctcttgacctcatgatctgcccacctcagcctcccaaagtgctgggattacaggggtgagccaccactcctggccaatagctgcatttctaagtaattagtctcctttgaaattctatgaattttatttcctgtagtttacagcattattttgagaagggatcaaagactcttccatatatcagaaggatcctggacagaacaagctcactgccaaccatttcccccaatatatacatgtatatatgtattttttttttttttttttttgagacacagtctcactctgttgcccaggctggagtgcagtggtgcaatcttggctcactgcagcctccgcctcatgggtttgagcgattctcgtgcctcagtcttccaagtagctgggattacagttgtgcaccaccactcctggctcattttttctatttttagtagagactggtttcattgtgttggcagggctagtcttggactcctggtctcagtgatccgcccgccttggcctcccgtagtgctgggattataggcgggagccaccatgcccagtccatttcccccagtatttgaaatgcacagtttctgctctggttcattggtcagggcaggactttctcgtttgccttaaacctaacagtagtttagaaattggcctgtaactttttttggcatgatttccttctgtttgtgctgatatttttctcacctcaataaggataggagcttcttttcctttttttttttttccaggtagaatcatgttttcttttaattgaatacttaactcacaatgtttcctgttttgcagctgctctgctaataattaggttcccacctctcaagatcattaggagcttcttttccaattcctctgttttgcatgcattggaaggtaagtttccttgtaaaccagattttggactctgcaggctttgccaaatggcctttttaccctcatgtatattgcattttctttggatagtctcatggattctcaaggatattgtattcctgtattttaccattcatgagtttagaagtgtgtttactttcctgagttttcattttctttttcttctgtcatatgtaatttacagagcaaatacctaccagaatggataacttgagagatgtggaaagtgagtttctttgcgcttatctagtgagggtgatttttagtcaataagcatttggtatatgcctgggaatccaacagctgctatttagattcagagccagcctttatttatcagctttctgatgctgaacccatcagtgaacttctctgtatatttgattcatcataaggaaaatggtgacgccgagggtgactgatttccaggtttacatcggttgccccaggggaagtgcctggcccccatctggtccttgctgctctaactttgccctgttaattgaagaaatgcaggtataaacacttcctgggttgttgctggcatttattgtcctcacagtttacagagaagcccatattttcagcctcttcctctgctttctgtcatttctgaaccatctcacccgacctggtgtaattttcattgtgtgtgagtttgcacagatgtaatttgggcctacatgtgtccaaagcctaatgcccacctcccacctccactaggatctggagctcaggacccactacctccccggcccactgcaagcttgaacatttgatggtggacacccctccctgactttgtattatggtgggttctcttgggtcttgttctctgtgggtctgtcctgcgctatactgtgtggagccggggggattttccctgtgttcccaaaagagggtcacaaggagtttttgagcaaagaggggctgatagttcttaagggtatcccacagaagggagaggccagacatattcaggaaaatcttgtttttttattcttgtaggtccagattttggatgaatctctatagagattgaacagataaggctcacctttcaatagttacaccaagaaaggcctaggtggtgacttaagctatggttttgggcagcacgagagtggtcaggtggacagtagggaagtctacatgtaacccaaacggaaaagagaaaaggcccctgagaaatcagggcaaagtcccacagtgtctctttccccatagtgtcactggtgtgggggttaccttcccactatgtctcccagaagacatgagggcacagactacagtgcctgtggacagaggagctgtggggatggaagtgtgattgcttcattcaaatgcacgccccggtgcgtgtgcgtctcttctgatgcagctccccatgggtaagctctgtgcttctccacacagtggatcaggagtggaaacattctgtctgtttagcacttgacggtttggtggtgacctgatgtcatggtgataatagaggcaatgatcctaacagcttagaactgttcagcttggccgggcctggtggctcacacctgtaatcccagcactttgggagactgaggtgggggtatcacctgaggtcaggagtttgagaccaggctggccaacatggcgaaaccccgtctctactaaaaatacaaaaattagccgggtatggtggcacacgcctgtaatcccagctacttgggaggctgaggcaggagaatcgcttgaacccggaaggtggaggcttcagtgagctgagatcttgccattgcactccagcctgggtgacggagcgagactctgtctcaaaaaaaaaaaaaaattgttcagcttgtgggtaggtatttgggaaacattatatgtattacctagtcttagttatctgcagtggttttgttattttttgcataaactgctgagaatgtttaataattgtagatgatagatcactagtcactctaaaatcttcccatttcttggtctagagctggggctggatccctcagcaacgaggagacctgaaaactagaggaaaaaaagcaggtcctccctataaaccactcatctgtgctctcttccaatttattctccttttgtgtacatcattttaaggggctataatcatcttgttcagacctcaggatataaaatgacccatctgtagacctccagccgtatcccaaagttgtctgttttgtttttttttgaaattcctgacaagtttcagttgtagctgtgccctgaggaaacattcccgattcccggagtagcttccaggttaaagtcctgtaggcttcttctgtttttagaaattcctatcagagaaagacctgattttggatttttagctttaatgcttgtgaaaagctataaaaataattttctacgcctagctttgaagtactgttagtgagaaattaaaattccttcaggaggattaaactgccatttctgttaccctaattacaaaagttttggttgttagaattttctttactgttcatgaagaagtattttatattttccttcgacattcattctctttagcaggtaattttgaactttagtttcttaaatacccaaatttggtttttcctcagtcttctctctgctacagatttctaacttaacaggaaaggcagttttcctcaaaaagggcaaagaacagcgggaacagtagagggcaccttcaaccccagcatggaattgacgttcctgcttcaaaatgaaccatcacagcaatcttggctttttgatttggaccctcatttctcttataatttgaacttatattggagagaaggggcctgtctcttaagccagctagtttttgtactggatatttatatatcatttcatttgttccttagtgttttttcatttctattatgatttgttctgtgggatgtgacttaccggtgtgtttttcacgtttataaagctgaatacttctgtatgtcagcttagcacccctagcatcagccatgctactctcctgctgtgcatagatgggggcctgtccccctgctgaatctcctgggttcctgctgtcaacacctgaaggtacccaccagatgtgtctgtcacttccctccatccacctctcttgtgtttctcatgtttctgcctccctagagaccatttctctctagagcagtgctttccaatagaaatacaatgccagacacatacgtcattttagattttctagtagtcactttagaaaagttaaaaagaggctgggcatggtagctcacacctgtaatcccagcactttgggaggctgaggtgggcagattagctgaggtcaggagttcgagaccagcctggccaacatggtgaaaccccgtcactactaaaaatacaaaaattagccgggtatggtagcaggtgcctgggattacagcctcccgagtaggctgagacatgagaatcacttgattctgggaggtggaggctgcagtgagccgaggtcatgtgcaccactgcaatccaaccttggcaacagagcaagactttgtctcacacaaaaaaaagaaaagaaagaaaagttaaaagggagcaggtgaaattaataatgtgttttatttcacctaaaatgttagtattatccagaatatcacttcaacgtcttatcaaaataaaaattattaatgagatagtttgcattcttcctcttttttgagatgggctcttgctttttttttggcccaggctggaatgcagtggcaccagcatagctcactgcagcctcaaactcctgggctcgagatcctcctgcctcagccttcctagtagttaggactacaggcacacaccaccatgcccagctaattgtttttcttttttgtttgtttgtttttcttttttttcttttttcttttttttttttttttgagaggaaatctcactctgtcacccagggtggagtgcaatggcatgatctcagctcattgcaacctccgcctcccaggtttaagtgattttcctgtctcagcctcccaagtagctgggactacaggcgtgcaccaccatgcctagctaatttttttgtatttttagtagagacagggtttcactatgttggccaggctggtcttgaactcctgacctcagctgatccacccacctcggcctcccaaagtgctgggattacaggtgtgagccactgcgccaagccttttttttttgagatagggtgatagggtctcactctgtcacccaggctgcagtggtatgatcttggctcactgcaacctctgccttccaggttccagtgatttttcccacctcagcttccctattagctgggactacaggtacacgccaccacacctggccaattttttgtattttttgtatacatagggtttcaccatgttggccaggctggtctcgaactcctgacgtcaagtgatccatctggcttggcctcccaaagtgctgggattacaggcgcgagtcaccgcacttggccttagcaatctttcaagtgctcagcagccacatgtggcagtggctgccttattggacagcgcagctctgaacggtgattttatgtacatccccactgctctctctgcctcctttattcccatctaccccacacccctgatgtctattggagggagtctactgggagtgtggaggctttcctgtccctagcatggatgacatcagcaggtggtgatgaaagtgattaaacagcattctcatcacaaaaaaaagtcaagtatttgaggtaatgggttggttaatttgatttcatcattccacatcgtaatgaaaagtcataccatcattttataccccataaatatatataatttagaagatagataaaaatcagccaaaacaattctttgaaatatttttaagcaaacatgtacaatttatggggtacaatatcatttgttagtatatataatttttttttatggggagtcagttaacacaggaaacagccccttgaaagggagatacccccacacccctggagtagcccctggaggactatcgcctccctctctcctctctttctgtctcatattcctttaatttggagaatcatttccaattccttaacattctggcctgatttttttctgtcttacattcaaaggtcacagttttcctctcaccctcatttcagtcttttcccataagatgtgacatgcctttttgtcttggttgggcatttatttgcaatacaagaatgattgttttctttgatacattaatgacttagatacttttcctagtaaaatgtatcttaacagaattccaaattaattctagacagcatatttttaaaggtgtgtatagagctccttatgtttcttccttgatttttaaaatgacatatttaggtctatatattttaggatataagatctctatgtgttgctttgcttcattgaacatttttggtgattatttttattttctgtgtattttaggatttccattaaactatattctcatttcaaatttctatctgagtgatagaattattttaatgtaggaaaggttcatcaaaaatgggtgtagtgattgtgttctttcctatgctcgaatggaaaatgatgaggggacatgatgttagagttgcagtgagaaggggtggaaaagagggattccagagtgccaggcacacaggttttctggaaggtttacatgaggactgctgtggtttgaatgtgttccccgaagttcatgtgttggaaactcaacccctaatgcaacagtgttgaccagtggaacctttaagaggtgattaggtcatgaaggctctgccctcatgaatggatgaagctagagtgggttagttatcttgggagggggttcctgataaaaggatgaggttggcttccttccctttctctttccccctccccccttcacatgtggtcactctcttgcccttccaccttccaccataggacggcacagtgagaccttcaccagatgcaggcccctcactttcccagtgttcagaaccgtaaaccaagtgaactcttgcttataaatcacccagtctgtggtattctgttatagcaacacaaacggactaagagagggacactcagtgggctcttctctctacttgatggagcactccctgcgtggtgccttgtatttgtagacatgatgctgtaaatgttttttgaatgtcttgaaggcttttgtttgaggagtttacagagaagcccctacaggcttcaggtcccttcttctgttgcttctttgctccttagttcctcccctaacctggtgctaaattagatcatagtgtggtccttggaccaacagtatcaatagcacctgaaagtcatgctggaaatacagattcacaggctgctccccagaatactgaagaagaaactctaggagtgagacccaacaatctgtgtttaacaagtccccaggtgagtctgatgcacacagaaatgtgagctgctgtattagatggtgttgagttcatgccaccggatcactgacacacacgtctgctcactgcttgctctttgcacaggcccctggatcctcctggaatccctgatccctgttgctccctggcggagttttctagtccctcttacttgaagcatgtctttcagagcccggcaccacccaagttgggtatctggtgaattctgtggtctgcatgtccatgtttgtgacattctgggaagggtggcccaggctgtgatttgccatctactgcaggctatggatggtattcagaagggaggggagatgctgtgtgcgtgttctgaagggtttcccactaaacagaccaaccctctccataactatttgatttttactttatctcctcgttgacttcacagtgtcagtgcagtttgtgtaaacatctctacggggtgatgcatgcagataaatgtttatgtgaacatataaagtctgcatgtgtgggtgaacactccacatcaggtcattgtccatcattacatatctgtggtgtctggctcattcctctcattttctgtcattttacctacttttacctgaagtacaatgactatttaataactattaaatgtttcatttcagctacacctctatggtatttttttcacctcatatcataccttcctccctcactggacttcagtgtgggacctgcaggtctcaggccttctgggaagtcccagcttttcttgaatgttctctctctctggccagctcaggctggagcagtgggtgttggtgccatcctgtggctataggtgataagccggctgttcttcactgacctggtcttaccttgaaccctggagttctcacatgcatggatttaaatgctgtgtctttctaagggcacattatggccattttccttatctccctcccaaggggctgtttcctgtatttattgactccctgtttaaaaaaaatatatgtatatatagacaaattggattgtaccccataaactgcatgttttaaaaatacttcaaagaatagtttttcatttttttcttgctggtttttatgtatcttctaaattgtatatatttatggggtataaaatgatgttgtgatttttcaatacagtgtggaatgagaatcaaattaacctatccgttacctcaagtacttgactttttttgtgatgagaaggctgtttatcactttcactcaccagctcctgctgtcttccatgctggggacaggaaaggctccacgcttgactttccctcctgttttcttatctgctgtcaacccctgaatgtaccctccaggattgacttctagaccttctacatctagctcgatcgttgtgcacccaccttcctcccagggactgtccttagggagtgactttatgcacaaacttcacatgctcttcctgcctccttcatccccagaagcccccatctcagccccatctgattatttcctccctctctcatttcctgttatgctgttggttttctaacctgaagggtaacttcttactccttagttttttgccttaatttctaagtcataggctactttcaggctaaaagttttcctccagccatggttttagtctcattctataagtcttgctaggtagtttattcattggaaattttttgtttttgagacagagtctcgctctatcacccaggctgtagtacagtggtgccatctcagctcactgcaacctccggttcccgggctcaagcagttctctttcctcagcctcctgagtagctgggattatgggtgcctgccaccacacccagctaatttttgtatttttagcagagacggcatttcaccatgtcagccaggttggtctcgaactcttgacctcaagtgatccgcccgccttggcctcccaaaatactgggattacaggggtgagtcaccgcaccccaccccttggcactatatttaagtgatgatatttttggacactgaggtagcctcattccacaggtttagatctgaagcattttcactattgcttctttccatgtatttcctggtttgcaggtcagtttcttcttttaattcatcattgacacagtggtttatatggcttttaatttcaaaagattttttaaaatatctttttgccgatttttatctatgttaattttaactagacatgttccctggaaggacatcactagttttttttttttttttccctctgtttataatttaggtggattttcacatctcaagccagctaagagtatgggaaataggactcgttaaagcacaggtatcacacaagtgattcagattcacgagggtaatccagatgaaggtatatcattgtacctggcccgcatcactcaataactgtcacctttgatttattgatttacttgagatggagtttggttctgtccccgaggccggagtgcaatggcgtgatctctgctcactacaacctctgcctcccaggttcagagtgattctcctgcctcagcctctttagctgggattacaggcacccaccaacatgcccagctaatttttgtatttttagtagagaggagctttcaccataatggccaggctggtcttgaacctcaaatgatctgcccaccttggcctcccaaagtgctaggattacaggctggagctacggagcccagcctgtcaccttgatttaaatgaatgcagctttcttggtgtcttgatgtttgtgaatttctgtggagtttgatactgctccttttgctgcttgtttttccagagtccccttatcacttgacgtgctgttatattatgtttgatttattacagataccccatcagcctgagtctcttaaaggcctttatacacatatgtctacacatagggatttggatgatctcgggatcccacatcctcgctgtcccctgtccccccacaacatcccacaccaatacctttctgaagttttctagtccctcctttttgtttgtggtccttaaagcccagccccatgcctgactttggttcccagtgagcattgtacatttgtggatattaaatctttggcaaagtcatttacctgggctggaatagggctcttggctgattctttttcctaaacacccacccaatgggagaggctgatactcaacatgcaaaccttgtgttttatttctccaggcgaagggatgttggaagacattctggaaggggtggggtgtgaagatttacaaataatctttgaatatctgcttcatgataggtcttggaggtgccttgtgggtgtggctttggggggatggttacgaggaaattgtggatattaaggaagtcaggaaaggaaaagatcagtcacaattcaacaattcagagaaagctcctaagggactttctggctgcttgatgcccagaggccaggccctcacttcgtattaaggctcaggactgtggatagagaatttaaaggggcaccaaaaaaacattaaaatagataaacatatttttaatggaatacctttaaaaatgcaaatcaatgcacaaagaaaacgcccatgttgaacaaaatggtgacaattgtgccttctcttcaacaccaccccaccctccagaagtttccttcaagccgtacctgtaagagtaaaaatagagaaaaataaaaacctttaagttaaaagataaaaatgagctgggtgtgggggctcatgcctgtaatcccagcactttgggaggccgaggcaggtggatcacttgaggtcaggagttcgagaccaggctgggcaatgtggtgaaacatcgtctctactaaaaatacaaaaaaacaaaaaaaatttaggtgggcacagtggcaggtgcctataatctcagctacttgggaggctgaggcaggagaatcgcttgaacctgggaggcggaggttgcaatgagccaagagcatgccattgcactacatcctgggagacagatcaagactctgtctcaaaaaaaacaaaacaaacaaacacctcgggaatttctggctcaagcctctgatcctcaccaccactatcaccaggggatcttttgctgttcacccaagtccagccttcatcccctaaactcctggggaaatgcgaccagactctccccatctccattccgggagtttgcctcaagccaatcttgttctccctgaaaacggccttggggttccccatcctggtacaccctcctactctaggggacacagggccgatgttgcccccaaaccggcagtcccaggagcgcatcgcttctccctgaactgcttctgccccaacctggcatctgcttggggaagggcaccccagggtggagacttgcatggtgagctcagctcaccttcaggtgaaggtcagcgcacactggccacccgggaccacattttccagaatcctttggcggtcccgcgatgctctcgtggtcagcagctctcattgggttgcagaggagaaacttgtccgtgtcactggggcatcttaacagtcggctcctaagcttggttgtgtgcgctgtgcagatgtgagaggcacaccgtgtgggcgaacccaactgcttgcctgcctctctagctccaaaactacaatccccagaggcctctgcggtcacttccactacccaccctacacaccttctgtgtgtcgcgttaatgtcagaagcacttctgtttggtggccccggctggttaggctggttggcacccagggaggcacccaggtcttccccacacctctgcacctcattacctgaccggcttctggatccgcagcgtgcatctgcagtctgtgagtcccctataggcactcagtatgcccctctgcgtgtccctctgttactcatggggacacagtctgggagccgtagacctgtctcagaactagggcgccctcctgtgggcacctccaggccattttcctttcactggagcccaccgggttagagacagaccctcactctgttgcttggggacaaaggcttcactccctggcccgagcttggggctgagctagagggttcggggtcatcctgggcccctctggatgggaattggctgccctgttaatttctgtgacatccccgaccctaacagtgggtctctggagcagactgcgcttcaccccatgggaagggggtttccacctgagagtcaaaaaagaggtgagaattctctgtaattccatcttgactgtcaacaggatggattctgttaccatttcttgccctggaggctgccttgttggtattggggaaagttcattcctagtcctggaaaagtggctcattccaactggagtcctccctcagcattcctttctgctgcatccatcctgcagtcattcatgttgttaattgtaaacaaacacacatggaacagtttaaataaaactacacagatgtgtgtgcttaattgttcagtgatgtggatgaagggcagggacagcagagatgcctgtgatttcaagggcttggggaggactcgtacaagtagagctgtctcagctgcccctgaccggtttggtaccttggagattcgggggaaggcattgcactcggaggcagaaggaagcatagtctgaggctgggctcttgctacagggtaggaaggattatggtggccaagagccttcttaaggttgatttttaaatatgcataggtgaagatacagactagctgttcacacatagaataaggagaagctttatagagtgtgacctaaattttacatcacagaacactttcaccttccggcagttgggacatttcacccaaaatttgaaattccctcctactctgaaaatgaatctggcctaactctgcactgatgaattttttttttttttttgagacagttttgtgcttgttacccaggctagagtgcagtggtgcaatctacactcaccgcaacctctgccacacgggttcaaccgattctcctgcctcagcctcccaaatagctgggatttacaggcatatgccaccacaccgcgctaactgtctggtacttttttttagtagacgcggagtttcatcatgttggttaggctggtgtgatcccctgacctcaagtgatccatccgcctcagcctcccaaattgctgggattaaagatgtgagacacctcactttgccagtatgcattgttcttagtgtcagccgctgaaactgctacttctgcgttacgcgactacgagccaccggtgagagagcagcccacgggcacacaggcggacctgtgctcgtcatcacaagggctccacttttggggagactcacccgcacaccgtccgcgcacgcctgaggctgggatcccgcgctgcctcgccggcgatctgtctgaggtttcttcctcctggggtttcttcctgctggtggaccctccgcgaatcccggcctccggagaccgtcctggtaactaccctggccaggactggtctcagcccagactcagacgcacgatcacacagggctgctacttcgccaagtgtcagggacccatccccgggcaacggtggctttcactgtggcccaagcggcggctcgggcctcgcgcatgcgcactggcgaggccgactcccccgctccacccccccttactccgcagagtcaggctgcggaccctttaaaaaatggcggcgacgcggcggctgcggggcctggggcggcggtgctggaggttgcgtcggcggcggcggcggcacagccagaggcggcgggtgggaagaggactgccagaggggcctgcgggagacccagggtcggacccataggagtcctgtggtgaggacctccttgatcgctcttctgcttcggttcccgctgaaggaggagtttcgggatgccggctgggctgcgcggactcctcttggggtccgatgatggatccaaccgggtgatcgggaatggggttccaatgcagtgaggccgaaagggtctcgccggggcacagaaagatccccagggccgcaaggcgtgctgtcggctgcaaaggcaccgacccatgagcccactgcctccctccctcctggcaggagcaggggcctgccttcatctccaaggcccgagggctccggcatcccgacgcggcttccggcgacacgggcaaagagagacagaggcgagtccgagctggagccagcgtgtccacatgtggcactgtcgtcccccaagagcacatgcaggcagcctgtgtctttgaggctgtagggggcgacgacaagacggacagtgatgtccaggcgtgcgcccggggggccactggagaccggccccacaaagcgaggaaaagccaagcgcacctgaaaacctgcgagacagggcctgtgcgcgagtccacgccacgttcagggaggcccgccagaggagccgagaggtttggacaaagtacaccccacccccagcccgccgccggctaggtacccctgacgcaacctcccctgcacccagccaaaacccagtcccgttggctccctgacatccgtggcagccaaaagattcggtgctagaaggcactttccccaggagcggaggaaccggttggccctcaagaatcagagaggaagtgcaggtgggatgcaacaccgcctttcctagaaggccaatgtcaggagcggtgggcttgcctccgcctcttcctggaccgagcgtgcagccatcacttgggccatggagaccgagagagcttccctgtcccacacaggtatggaagcccagagctccaggatcaccacagctgcccaatcatccagaaagaggtgtggagagggaaacaatcatgacgcggaccgccacgaggtttctccctgatggacggggaagtcttctttgtggaagacactgagccacgctaagaagccgccaggcttctcagagacggggcagacacagcaagagggaggtcagagcagaggccagagcccaggcaggatacgggggggccatgccaccaccaccggcatccggggaggagtgtcaaacgggtgactcggccaggaaggccagcctttgagagacagacatgcttgccccatccccttgccggcttccttctccgtccctgcgtcgagctgtggctacatttctcgatgagggcagagggcgacaggcgtgacaaccaccttcttgaagctctgcgggcaccctcctgcgggtggacaatgagcgcctgggaggccgttgtccttggttggggagcgctcgtctggatccagcctagcaaagaggctgctccggatggggaggggatgaaaacccctgcgggttcgacgccgatgcccacgttgcccaggccttcacagacccccaaactggaactgccgggaccacgactgccaaccggccacacgacccaggcagagacgcggggacacgctgaccagaagaaaggccgacgtgcaagaaacccaccctccggcgcacagggcccatgtgtcccaaggcgcacgcacacacagacggacagagacagaaagagagggcgaccgaaagagcgagaagggagagagacaaagagagagagagagagagagagagagagagagagagagagacgtgagagagagacagaagtcggcacacagacacgcactgcgcgcgcacacacacagacaaacacacagacgcatccccccaacacacacacacacacccataacgaacacacacgtacagcagggaacacccacccgcaggcagcccctgaagctgccgggttctgctctccgcgactaagagccaccggtgagagagcagcccacgggcacacaggcggacctgtgctcgtcatcacaagggctccacttttggggagactcacccgcacaccgtccgcgcacgcctgaggctgggatcccgcgctgcctcgccggcgatctgtctgaggtttcttcctcttggggtttcttcctgctggtggaccctccgcgaatcccggcctccggagaccgtcctggtaactgccctggccaggactggtctcagcccagactcagacgcacgatcacacagggctcctacttcgccaagtgtcagggacccatccccgggcaacggtggctttcactttgacccaagcggcggcttgggcctcgcgcatgcgcactggcgaggccgactccccccgctccagccccccttactccgcagagtcaggctgcggaccctttaaaaaatggcggcgacgcggcggctgcggggcctggggcggcggtgctggaggttgcggcggcggcggtggcggcgcagcccgaggcggcgggtgggaagaggactgccagaggggcctgcgggagacccagggtcggacccataggagtcctgtggtgaggacctccttgatcgctcttctgcttcggttcccgcgaaaggaggagcttcgggatgccggctgggctgcgcggactcctcttggggtccgatgatggatccaaccgggtgatcgggaatggggttccaatgcagtgaggccgaaagggtctcgccggggcacagaaagatccccagggccgcaaggcgtgctgtcggctgcaaaggcaccgacccatgagcccactgcctccctccctcctggcaggagcaggggcctgccttcatctccaaggcccgagggctccggcatcccgacgcggcttccggcgacacgggccaagagagacagaggcgagtccgagctggtgccagcgtgtccacatgtggcactgtcgtcccccaagagcacatgcaggtagcgtgtgtctttgaggccgtagggggcgacgacgagacggacagtgatgtccaggcgtgcgcccggggggccactggagacctgccccacaaagcggaggaaaagccaagcgcacctgaaaacctgcgagacagggcctgtgcgcgagtccacgccacgttcagggaggcccgccagaggagccgagaggtttggacaaagtacaccccacccccagcccgccgccggctaggtacccctgacgcaacctcccctgcacccagccaaaacccagtcccgttggctccctgacatccgtggcagccaaaagattcggtgctagaaggcactttccccaggagcggaggaaccggttggccctcaagaatcagagaggaagtgcaggtgggatgcaacaccgcctttcctagaaggccaatgtcaggagcggtgggcttgcctccgcctcttcctggaccgagcgtgcagccatcacttgggccatggagaccgagagagcttccctgtcccacacaggtatggaagcccagagctccaggatcaccacagctgcccaatcatccagaaagaggtgtggagagggaaacaatcatgacgcggaccgccacgaggtttctccctgatggacggggaagtcttgtttgtggaagacactgagccacactaagaagccgccaggcttctcagagacggggcagacacagcaagagggaggtcagagcagaggccagagcccaggcaggatacgggggggccatgccaccaccaccggcatccggggaggagtgtcaaacgggtgactcggccaggaaggccagcctttgagagacagacatgcttgccccatccccttgccggcttccttctccgtccctgcgtcgagctgtggctacatttctcgatgagggcagagggcgacaggcgtgacaaccaccttcttgaagctctgcgggcacccttcctgcgggtggacaatgagcgcctgggaggccgttgtccttggttggggagcgctcgtctggatccagcctagcaaagaggctgctccggatggggaggggatgaaaaccctgcgggtccgacacccatgcccacgttgcccaggccttcacagacccccaaactggaaccgccgggacgacgactgccaaccggccacacgacccaggcagagacgcggggagacgctgaccagaagaaaggccgacgtgcaagaaatccaccctccggcgcacagggcccatgtgtcccaaggcgcacgcatacacagacggacagagacagaaagagagggcgaccgaaagagcgagaagggagagagacagagagagagagagagagagagagagagagagagagagagagacagaagtcggcacacagacacgcactgcgcgcgcacacacacagacacacacacagacgcatccccccaacacacacacacacacccataacgaacacacacgtacagcagggaacacccacccgcaggcagcccctgaagctgccgggttctgctctccgcgactaagagccaccggtgagagagcagcccacgggcacacaggcggacctgtgctcgtcatcacaagggctccacttttggggagactcacccgcacaccgtccgcgcacgcctgaggctgggatcccgcgctgcctcgccggcgatctgtctgaggtttcttcctcctggggtttcttcctgctggtggaccctccgcgaatcccggcctccggagaccgtcctggtaactaccctggccaggactggtctcagcccagactcagacgcacgatcacacagggctgctacttcgccaagtgtcagggacccatccccgggcaacggtggctttcactgtggcccaagcggcggctcgggcctcgcgcatgcgcactggcgaggccgactcccccgctccacccccccttactccgcagagtcaggctgcggaccctttaaaaaatggcggcgacgcggcggctgcggggcctggggcggcggtgctggaggttacgtcggcggcggcggcggcacagccagaggcggcgggtgggaagaggactgccagaggggcctgcgggagacccagggtcggacccataggagtcctgtggtgaggacctccttgatcgctcttctgcttcggttcccgctgaaggaggagtttcgggatgccggctgggctgcgcggactcctcttggggtccgatgatggatccaaccgggtgatcgggaatggggttccaatgcagtgaggccgaaagggtctcgccggggcacagaaagatccccagggccgcaaggcgtgctgtcggctgcaaaggcaccgacccatgagcccactgcctccctccctcctggcaggagcaggggcctgccttcatctccaaggcccgagggctccggcatcccgacgcggcttccggcgacacgggcaaagagagacagaggcgagtccgagctggagccagcgtgtccacatgtggcactgtcgtcccccaagagcacatgcaggcagcgtgtgtctttgaggccgtagggggcgacgacgagacggacagtgatgtccaggcgtgcgcccggggggccactggagacctgccccacaaagcggaggaaaagccaagcgcacctgaaaacctgcgagacagggcctgtgcgcgagtccacgccacgttcagggaggcccgccagaggagccgagacgtttggacaaagtacaccccacccccagcccgccgccggctaggtacccctgacgcaacctcccctgcacccagccaaaacccagtcccgttggctccctgacatccgtggcagccaaaagattcggtgctagaaggcactttccccaggagcggaggaaccggttggccctcaagaatcagagaggaagtgcaggtgggatgcaacaccgcctttcctagaaggccaatgtcaggagcggtgggcttgcctccgcctcttcctggaccgagcgtgcagccatcacttgggccatggagaccgagagagcttccctgtcccacacaggtatggaagcccagagctccaggatcaccacagctgcccaatcatccagaaagaggtgtggagagggaaacaatcatgacgcggaccgccacgaggtttctccctgatggacggggaagtcttgtttgtggaagacactgagccacgctaagaagccgccaggcttctcagagacggggcagacacagcaagagggaggtcagagcagaggccagagcccaggcaggatacgggggggccatgccaccaccaccggcatccggggaggagtgtcaaacgggtgactcggccaggaaggccagcctttgagagacagacatgcttgccccatccccttgccggcttccttctccgtccctgcgtcgagctgtggctacatttctcgatgagggcagagggcgacaggcgtgacaaccaccttcttgaagctctgcgggcaccctcctgcgggtggacaatgagcgcctgggaggccgttgtccttggttggggagcgctcgtctggatccagcctagcaaagaggctgctccggatggggaggggatgaaaacccctgcgggttcgacgccgatgcccacgttgcccaggccttcacagacccccaaactggaactgccgggacgacgactgccaaccggccacacgacccaggcagagacgcggggacacgctgaccagaagaaaggccgacgtgcaagaaacccaccctccggcgcacagggcacatgtgtcccaaggcgcacgcacacacagacggacagagacagacagagagggcgacggaaacagcgagaagggagagagagagagagagagagagagagagagagagagagagagagagagaggtgagagagagtcagaagtcggcacacagacacgcactgcgcgcgcacacacacagacacacacacagacgcacccccccaacacacacacacacacccataacgaacacacacgtacagcagggaacacccacccgcaggcagcccctgaagctgccgggttctgctctccgcgactaagagccaccggtgagagagcagcccacgggcacacaggcggacctgtgctcgtcatcacaagggctccacttttggggagactcacccgcacaccgtccgcgcacgcctgaggctgggatgccgcgctgcctcgccggcgatctgtctgagttttcttcctcctggcgtttcttcctgctggtggaccctccgcgaatcccggcctccggaaaccgtcctggtaactgccctgaccaggactggtctcagcccagactcagacgcacgatcacacagggctcctacttcgccaagtgtcagggacccatccccgggcaacggtggctttcactgtgacccaagcggcggcttgggcctcgcgcatgcgcactggcgaggccgactcccccgctccacccccccttactccgcagagtcaggctgcggaccctttaaaaaatggcggcgacgcggcggctgcggggcctggggcggcggtgctggaggttgcggcggcggcggtggcggcgcagcccgaggcggcgggtgggaagaggactgccagaggggcctgcggcagacccagggtcggactcataggagtcctgtggtgaggacctccttgatcgctcttctgcttcggttcccgctgaaggaggagcttcgggatgccggctgggctgcgcggactcctcttggggtccgatgatggatccaaccgggtgatcgggaatggggttccaatgcagtgaggccgaaagggtctcgccggggcacagaaagatccccagggccgcaaggcgtgctgtcggctgcaaaggcaccgacccatgagcccactgcctccctccctcctggcaggagcaggggcctgccttcatctccaaggcccgagggctccggcatcccgacgcggcttccggcgacacgggcaaagagagacagaggcgagtccgagctggtgccagtgtgtccacatgtggcactgtcgtcccccaagagcacatgcaggccgcgtgtgtctttgaggccgtagggggcaacgacgagacggacagtgatgtccaggcgtgcgcccggggggccactggagacctgccccacaaagcggaggaaaagccaagcgcacctgaaaacctgcgagacagggcctgtgcgcgagtccacgccacgttcagggaggcccgccagaggagccgagacgtttggacaaagtacaccccaccctcagcccgccgccggctaggtacccctgacgcaaactcccctgcacccagccaaaacccagtcccgttggctccctgacatccgtggcagccaaaagattcggtgctagaaggcactttccccaggagcggaggaaccggttggccctcaagaatcagagaggaagtgcaggtgggatgcaacaccgcctttcctagaaggccaatgtcaggagcggtgggcttgcctccgcctcttcctggaccgagcgtgcagccatcacttgggccatggagaccgagagagcttccctgtcccacacaggtatggaagcccagagctccaggatcaccacagctgcccagtcatccagaaagaggtgtggagagggaaacaatcatgacgcggaccgccacgaggtttctccctgatggacggggaagtcttctttgtggaagacactgagccacgctaagaagccgccaggcttctcagagacggggcagacacagcaagagggaggtcagagcagaggccagagcccaggcaggatacgggggggccatgccaccaccaccggcatccggggaggactgtcaaacgggtgactcggccaggaaggccagcctttgagagacagacatgcttgccccatccccttgccggcttccttctccgtccctgcgtcgagctgtggctacatttctcgatgagggcagagggcgacaggcgtgacaaccaccttcttgaagctctgcgggcaccctcctgcgggtggacaatgagcgcctgtgaggccgttgtccttggttggggagcgctcgtctggatccagcctagcaaagaggctgctccggatgtggaggggatgaaaacccctgcgggttcgacgccgatgcccacgttgcccaggccttcacagacccccaaactggaactgccgggacgacgactgccaaccggccacacgacccaggcagagacgcggggacacgctgaccagaagaaaggccgacgtgcaagaaacccaccctccggcgcacagggcacatgtgtcccaaggcgcacgcacacacagacggacagagacagacagagagggcgacggaaacagcgagaagggagagagagagagagagagagagagacagagagagacgtgagagagacacagaagtcggcacacagacacgcactgcgcgcgcacacacacagacacacacacagacgcacccccccaacacacacacacacacccataacgaacacacacgtacagcagggaacacccacccgcaggcagcccctgaagctgccgggttctgctctccgcgactaagagccaccggtgagagagcagcccacgggcacacaggcggacctgtgctcgtcatcacaagggctccacttttggggagactcacccgcacaccgtccgcgcacgcctgaggctgggatcccgcgctgcctcgccggcgatctgtctgaggtttcttcctcttggggtttcttcctgctggtggaccctccgcgaatcccggcctccggagaccgtcctggtaactgccctggccaggactggtctcagcccagactcagacgcacgatcacacagggctcctacttcgccaagtgtcagggacccatccccgggcaacggtggctttcactttgacccaagcggcggcttgggcctcgcgcatgcgcactggcgaggccgactccccccgctccagccccccttactccgcagagtcaggctgcggaccctttaaaaaatggcggcgacgcggcggctgcggggcctggggcggcggtgctggaggttgcggcggcggcggtggcggcgcagcccgaggcggcgggtgggaagaggactgccagaggggcctgcgggagacccagggtcggacccataggagtcctgtggtgaggacctccttgatcgctcttctgcttcggttcccgcgaaaggaggagcttcgggatgccggctgggctgcgcggactcctcttggggtccgatgatggatccaaccgggtgatcgggaatggggttccaatgcagtgaggccgaaagggtctcgccggggcacagaaagatccccagggccgcaaggcgtgctgtcggctgcaaaggcaccgacccatgagcccactgcctccctccctcctggcaggagcaggggcctgccttcatctccaaggcccgagggctccggcatcccgacgcggcttccggcgacacgggccaagagagacagaggcgagtccgagctggtgccagcgtgtccacatgtggcactgtcgtcccccaagagcacatgcaggtagcgtgtgtctttgaggccgtagggggcgacgacgagacggacagtgatgtccaggcgtgcgcccggggggccactggagacctgccccacaaagcggaggaaaagccaagcgcacctgaaaacctgcgagacagggcctgtgcgcgagtccacgccacgttcagggaggcccgccagaggagccgagaggtttggacaaagtacaccccacccccagcccgccgccggctaggtacccctgacgcaacctcccctgcacccagccaaaacccagtcccgttggctccctgacatccgtggcagccaaaagattcggtgctagaaggcactttccccaggagcggaggaaccggttggccctcaagaatcagagaggaagtgcaggtgggatgcaacaccgcctttcctagaaggccaatgtcaggagcggtgggcttgcctccgcctcttcctggaccgagcgtgcagccatcacttgggccatggagaccgagagagcttccctgtcccacacaggtatggaagcccagagctccaggatcaccacagctgcccaatcatccagaaagaggtgtggagagggaaacaatcatgacgcggaccgccacgaggtttctccctgatggacggggaagtcttgtttgtggaagacactgagccacgctaagaagccgccaggcttctcagagacggggcagacacagcaagagggaggtcagagcagaggccagagcccaggcaggatacgggggggccatgcctccaccaccggcatccggggaggactgtcaaacgggtgactcggccaggaaggccagcctttgagagacagacatgcttgccgccccatccccttgccggcttccttctccgtccctgcgtcgagctgtggctacatttctcgatgagggcagagggcgacaggcgtgacaaccaccttcttgaagctctgcgggcaccttcctgcgggtggacaatgagcgcctgggaggccgttgtccttggttggggagcgctcgtctggatccagcctagcaaagaggctgctccggatggggaggggatgaaaacccctgcgggttcgacgccgatgcccacgttgcccaggccttcacagacccccaaactggaactgctgggacgacgactgccaaccggccacacgacccaggcagagacgcggggagaggctgaccagaaggaaggccgacgtgcaagaaacccaccctccggcgcacagggcacatgtgtcccaaggcgcacgcacacacagacggacagagacagacagagagggcgacggaaacagcgagaagggagagagagagagagagagagagagacagagagagacgtgagagagagacagaagtcggcacacagacacgcactgcgcgcgcacacacacagacacacacacagacgcatccccccaacacacacacacacacccataacgaacacacacgtacagcagggaacacccacccgcaggcagcccctgaagctgccgggttctgctctccgcgactaagagccaccggtgagagagcagcccacgggcacacaggcggacctgtgctcgtcatcacaagggctccacttttggggagactcacccgcacaccgtccgcgcacgcctgaggctgggatgccgcgctgcctcgccggcgatctgtctgagttttcttcctcctggggtttcttcctgctggtggaccctccgcgaatcccggcctccggagaccgtcctggtaactgccctggccaggactggtctcagcccagactcagacgcacgatcacacagggctcctacttcgccaagtgtcagggacccatccccgggcaacggtggctttcactgtgacccaagcggcggcttgggcctcgcgcatgcgcactggcgaggccgactcccccgctccacccccccttactccgcagagtccggctgcggaccctttaaaaaatggcggcgacgcggcggctgcggggcctggggcggcggtgctggaggttgcggcggcggcggtggcggcgcagcccgaggcggcgggtgggaagaggactgccagaggggcctgcgggagacccagggtcggacccataggagtcctgtggtgaggacctccttgatcgctcttctgcttcggttcccgcgaaaggaggagcttcgggatgccggctgggctgcgcggactcctctcggggtcggatgatggatccaaccgggtgatcgggaatggggttccaatgcagtgaggccgaaagggtctcgccggggcacagaaagatccccagggccgcaaggcgtgctgtcggctgcaaaggcaccgacccatgagcccactgcctccctccctcctggcaggagcaggggcctgccttcatctccaaggcccgagggctccggcatcccgacgcggcttccggcgacacgggcaaagagagacagaggcgagtccgagctggtgccagcgtgtccacatgtggcactgtcgtcccccaagagcacatgcaggcagcgtgtgtctttgaggccgtagggggcgacgacgagacggacagtgatgtccaggcgtgcgcccggggggccactggagacctgccccacaaagcggaggaaaagccaagcgcacctgaaaacctgcgagacagagcctgtgcgcgagtccacgccacgttcagggaggcccgccagaggagccgagaggtttggacaaagtacaccccacccccagcccgccgccggctaggtacccctgacgcaacctcccctgcacccagccaaaacccagtcccgttggctccctgacatccgtggcagccaaaagattcggtgctagaaggcactttccccaggagcggaggaaccggttggccctcaagaatcagagaggaagtgcaggtgggatgcaacaccgcctttcctagaaggccaatgtcaggagcggtgggcttgcctccgcctcttcctggaccgagcgtgcagccatcacttgggccatggagaccgagagagcttccctgtcccacacaggtatggaagcccagagctccaggatcaccacagctgcccaatcatccagaaagaggtgtggagagggaaacaatcatgacgcggaccgccacgaggtttctccctgatggacggggaagtcttctttgtggaagacactgagccacgctaagaagccgccaggcttctcagagacggggcagacacagcaagagggaggtcagagcagaggccagagcacaggcaggatacggggggaccatgccaccaccaccggcatccggggaggactgtcaaacgggtgactcggccaggaaggccagcctttgagagacagacatgcttgccgccccatccccttgccggcttccttctccgtccctgcgtcgagctgtggctacatttctcgatgagggcagagggcgacaggcgtgacaaccaccttcttgaagctctgcgggcaccctcctgcgggtggacaatgagcgcctgggaggccgttgtccttggttggggagcgctcgtctggatccagcctagcaaagaggctgctccggatggggaggggatgaaaaccctacgggtccgacacccatgcccacgttgcccaggccttcacagacccccaaactggaactgccgggacgacgactgccaaccggccacacgacccaggcagagacgcggggagacgctgaccagaagaaaggccgacgtgcaagaaatccaccctccggcgcacagggcccatgtgtcccaaggcgcacgcacacacagacggagagagacagaaagagagggcgaccgaaagagcgagaagggagagagacagagagagagagagagagagagagagagagagagagagacagaagtcggcacacagacacgcactgcgcgcgcacacacacagacacacacacagacgcatccccccaacacacacacacacacccataacgaacacacacgtacagcagggaacacccacccgcaggcagcccctgaagctgccgggttctgctctccgcgactaagagccaccggtgagagagcagcccacgggcacacaggcggacctgtgctcgtcatcacaagggctccacttttggggagactcacccgcacaccgtccgcgcacgcctgaggctgggatcccgcgctgcctcgccggcgatctgtctgaggtttcttcctcttggggtttcttcctgctggtggaccctccgcgaatcccggcctccggagaccgtcctggtaactgccctggccaggactggtctcagcccagactcagacgcacgatcacacagggctcctacttcgccaagtgtcagggacccatcccctggcaacggtggctttcactgtgacccaagcggcggcttgggcctcgcgcatgcgcactggcgaggccgactcccccgctccacccccccttactccacagagtcaggctgcggaccctttaaaaaatggcggcgacgcggcggctgcggggcctggggcggcggtgctggaggttgcggcggcggcggtggcggcgcagcccgaggcggcgggtgggaagaggactgccagaggggcctgcgggagacccagggtcggacccataggagtcctgtggtgaggacctccttgatcgctcttctgcttcggttcccgcgaaaggaggagcttcgggatgccggctgggctgcgcggactcctcttggggtccgatgatggatccaaccgggtgatcgggaatggggttccaatgcagtgaggccgaaagggtctcgccggggcacagaaagatccccagggccgcaaggcgtgctgtcggctgcaaaggcaccgacccatgagcccactgcctccctccctcctggcaggagcaggggcctgccttcatctccaaggcccgagggctccggcatcccgacgcggcttccggcgacacgggcaaagagagaggcgagtccgagctgcagccagcgtgtccacatgtggcactgtcgtcccccaagagcacatgcaggcagcgtgtgtctttgaggccgtagggggcgacgacgagacggacagtgatgtccaggcgtgcgcccggggggccactggagacctgccccacaaagcggaggaaaagccaagcgcacctgaaaacctgcgagacagggcctgtgcgcgagtccacgccacgttcagggaggcccgccagaggagccgagaggtttggacaaagtacaccccacccccagcccgccgccggctaggtacccctgacgcaacctcccctgcacccagccaaaacccagtcccgttggctccctgacatccgtggcagccaaaagattcggtgctagaaggcactttccccaggagcggaggaaccggttggccctcaagaatcagagaggaagtgcaggtgggatgcaacaccgcctttcctagaaggccaatgtcaggagcggtgggcttgcctccgcctcttcctggaccgagcgtgcagccatcacttgggccatggagaccgagagagcttccctgtcccacacaggtatggaagcccagagctccaggatcaccacagctgcccagtcatccagaaagaggtgtggagagggaaacaatcatgacgcggaccgccacgaggtttctccctgatggacggggaagtcttctttgtggaagacactgagccacgctaagaagccgccaggcttctcagagacggggcagacacagcaagagggaggtcagagcagaggccagagcccaggcaggatacgggggggccatgccaccaccaccggcatccggggaggagtgtcaaacgggtgactcggccaggaaggccagcctttgagagacagacatgcttgccccatccccttgccggcttccttctccgtccctgcgtcgagctgtggctacatttctcgatgagggcagagggcgacaggcgtgacaaccgccttcttgaagctctgcgggcaccctcctgcgggtggacaatgagcgcctgggaggccgttgtccttggttggggagcgctcgtctggatccagcctagcaaagaggctgctccggatggggaggggatgaaaacccctgcgggttcgacgccgatgcccacgttgcccaggccttcacagacccccaaactggaactgccgggacgacgactgccaaccggccacacgacccaggcagagacgcggggagaggctgaccagaagaaaggccgacgtgcaagaaacccaccctccggcgtacagggcacatgtgtcccaaggcgcacgcacacacagacggacagagatagaaagagagggcgacggaaacagcgagaagggagagagagagagagagagagagagagagacagagagagacgtgagagagagacagaagtcggcacacagacacgcactgcgcgcgcacacacacagacacacacacagacgcacccccccaacacacacacacacacccataacgaacacacacgtacagctgggaacacccacccgcaggcagcccctgaagctgccgggttctgctctccgagactaagagccaccggtgagagagcagcccacgggcacacaggcggacctgtgctcgtcatcacaagggctccacttttggggagactcacccgcacaccgtccgcgcacgcctgaggctgggatcccgcgctgcctcgccggcgatctgtctgaggtttcttcctcttggggtttcttcctgctggtggaccctccgcgaatcccggcctccggagaccgtcctggtaactgccctggccaggactggtctcagcccagactcagacgcacgatcacacagggctcctacttcgccaagtgtcagggacccatccccgggcaacggtggctttcactgtgacccaagcggcggcttgggcctcgtgcatgcgcactggcgaggccgactcccccgctccacccccccttactccgcagagtcaggctgcggaccctttaaaaaatggcggcgacgcggcggctgcggggcctggggcggcggtgctggaggttgcggcggcggcggtggcggcgcagcccgaggcggcgggtgggaagaggactgccagaggggcctgcgggagacccagggtcggacccataggagtcctgtggtgaggacctccttgatcgctcttctgcttcggttcccgcgaaaggaggagcttcgggatgccggctgggctgcgcggactcctcttggggtccgatgatggatccaaccgggtgatcgggaatggggttccaatgcagtgaggccgaaagggtctcgccggggcacagaaagatccccagggccgcaaggcgtgctgtcggctgcaaaggcaccgacccatgagcccactgcctccctccctcctggcaggagcaggggcctgccttcatctccaaggcccgagggctccggcatcccgacgcggcttccggcgacacgggcaaagagagacagaggcgagtccgagctggtgccagcgtgtccacatgtggcactgtcgtcccccaagagcacatgcaggcagcgtgtgtctttgaggccgtagggggcaacgacgagacggacagtgatgtccaggcgtgcgcccggggggccactggagacctgccccacaaagcggaggaaaagccaagcgcacctgaaaacctgcgagacagggcctgtgcgcgagtccacgccacgttcagggaggcccgccagaggagccgagaggtttggacaaagtacaccccaccctcagcccgccgccggctaggtacccctgacgcaaactcccctgcacccagccaaaacccagtcccgttggctccctgacatccgtggcagccaaaagattcggtgctagaaggcactttccccaggagcggaggaaccggttggccctcaagaatcagagaggaagtgcaggtgggatgcaacaccgcctttcctagaaggccaatgtcaggagcggtgggcttgcctccgcctcttcctggaccgagcgtgcagccatcacttgggccatggagaccgagagagcttccctgtcccacacaggtatggaagcccagagctccaggatcaccacagctgcccagtcatccagaaagaggtgtggagagggaaacaatcatgacgcggaccgccacgaggtttctccctgatggacggggaagtcttctttgtggaagacactgagccacgctaagaagccgccaggcttctcagagacggggcagacacagcaagagggaggtcagagcagaggccagagcccaggcaggatacgggggggccatgccaccaccaccggcatccggggaggactgtcaaacgggtgactcggccaggaaggccagcctttgagagacagacatgcttgccccatccccttgccggcttccttctccgtccctgcgtcgagctgtggctacatttctcgatgagggcagagggcgacaggcgtgacaaccaccttcttgaagctctgcgggcaccctcctgcgggtggacaatgagcgcctgtgaggccgttgtccttggttggggagcgctcgtctggatccagcctagcaaagaggctgctccggatgtggaggggatgaaaacccctgcgggttcgacgccgatgcccacgttgcccaggccttcacagacccccaaactggaactgccgggacgacgactgccaaccggccacacgacccaggcagagacgcggggacacgctgaccagaagaaaggccgacgtgcaagaaacccaccctccggcgcacagggcacatgtgtcccaaggcgcacgcacacacagacggacagagacagacagagagggcgacggaaacagcgagaagggagagagagagagagagagagagagacagagagagacgtgagagagacacagaagtcggcacacagacacgcactgcgcgcgcacacacacagacacacacacagacgcacccccccaacacacacacacacacccataacgaacacacacgtacagcagggaacacccacccgcaggcagcccctgaagctgccgggttctgctctccgagactaagagccaccggtgagagagcagcccacgggcacacaggcggacctgtgctcgtcatcacaagggctccacttttggggagactcacccgcacaccgtccgcgcacgcctgaggctgggatgccgcgctgcctcgccggcgatctgtctgagttttcttcctcctggggtttcttcctgctggtggaccctccgcgaatcccggcctccggagaccgtcctggtaaatgccctggccaggactggtctcagcccagactcagacgcacgatcacacagggctcctacttcgccaagtgtcagggacccatccccgggcaacggtggctttcactgtgacccaagcggcggcttgggcctcgcgcatgcgcactggcgaggccgactcccccgctccacccccccttactccgcagagtcaggctgcggaccctttaaaaaatggcggcgacgcggcggctgcggggcctggggcggcggtgctggaggttgccgtggcggcggtggcggcgcagcccgaggcggcgggtgggaagaggactgccagaggggcctgcgggagacccagggtcggacccataggagtcctgtggtgaggacctccttgagcgctcttctgcttcggttcccgctgaaggaggagcttcgggatgccggctgggctgcgcggactcctcttggggtccgatgatggatccaaccgggtgatcgggaatggggttccaatgcagtgaggccgaaagggtctcgccggggcacagaaagatccccagggccgcaaggcgtgctgtcggctgcaaaggcaccgacccatgagcccactgcctccctccctcctggcaggagcaggggcctgccttcatctccaaggcccgagggctccggcatcccgacgcggcttccggcgacacgggcaaagagagacagaggcgagtccgagctggagccagcgtgtccacatgtggcactgtcgtcccccaagagcacatgcaggcagcgtgtgtctttgaggccgtagggggcgacgacgagacggacagtgatgtccaggcgtgcgcccggggggccactggagacctgccccacaaagcggaggaaaagccaagcgcacctgaaaacctgcgagacagggcctgtgcgcgagtccacgccacgttcagggaggcccgccagaggagccgagaggtttggacaaagtacaccccacccccagcccgccgccggctaggtacccctgacgcaacctcccctgcacccagccaaaacccagtcccgttggctccctgacatccgtggcagccaaaagattcggtgctagaaggcactttccccaggagcggaggaaccggttggccctcaagaatcagagaggaagtgcaggtgggatgcaacaccgcctttcctagaaggccaatgtcaggagcggtgggcttgcctccgcctcttcctggaccgagcgtgcagccatcacttgggccatggagaccgagagagcttccctgtcccacacaggtatggaagcccagagctccaggatcaccacagctgcccaatcatccagaaagaggtgtggagagggaaacaatcatgacgcggaccgccacgaggtttctccctgatggacggggaagtcttctttgtggaagacactgagccacgctaagaagctgccaggcttctcagagacggggcagacacagcaagagggaggtcagagcagaggccagagcccaggcaggatacgggggggccatgccaccaccaccggcatccggggaggagtgtcaaacgggtgactcggccaggaaggccagcctttgagagacagacatgcttgccccatccccttgccggcttccttctccgtccctgcgtcgagctgtggctacatttctcgatgagggcagagggcgacaggcgtgacaaccaccttcttgaagctctgcgggcaccctcctgcgggtggacaatgagcgcctgggaggccgttgtccttggttggggagcgctcgtctggatccagcctagcaaagaggctgctccggatggggaggggatgaaaacccctgcgggttcgacgccgatgcccacgttgcccaggccttcacagacccccaaactggaactgccgggacgacgactgccaaccggccacacgacccaggcagagacgcggggacacgctgaccagaagaaaggccgacgtgcaagaaacccaccctccggcgcacagggcacatgtgtcccaaggcgcacgcacacacagacggacagagacagacagagagggcgacggaaacagcgagaagggagagagagagagagagagacagagagacagagagagacgtgagagagagacagaagtcggcacacagacacgcactgcgcgcgcacacacacagacacacacacagacgcacccccccaacacacacacacacacccataacgaacacacacgtacagcagggaacacccacccgcaggcagcccctgaagctgccgggttctgctctccgagactaagagccaccggtgagagagcagcccacgggcacacaggcggacctgtgctcgtcatcacaagggctccacttttggggagactcacccgcacaccgtccgcgcacgcctgaggctgggatcccgcgctgcctcgccggcgatctgtctgaggtttcttcctcttggggtttcttcctgctggtggaccctccgcgaatcccggcctccggagaccgtcctggtaactgccctggccaggactggtctcagcccagactcagacgcacgatcacacagggctcctacttcgccaagtgtcagggacccatccccgggcaacggtggctttcactgtgacccaagcggcggcttgggcctcgcgcatgcgcactggcgaggccgactcccccgctccacccccccttactccgcagagtcaggctgcggaccctttaaaaaatggcggcgacgcggcggctgcggggcctggggcggcggtgctggaggttgcggcggcggcggtggcggcgcagcccgaggcggcgggtgggaagaggactgccagaggggcctgcgggagacccagggtcggacccataggagtcctgtggtgaggacctccttgatcgctcttctgcttcggttcccgcgaaaggaggagcttcgggatgccggctgggctgcgcggactcctcttggggtccgatgatggatccaaccgggtgatcgggaatggggttccaatgcagtgaggccgaaagggtctcgccggggcacagaaagatccccagggcgcaaggcgtgctgtcggctgcaaaggcaccgacccatgagcccactgcctccctccctcctggcaggagcaggggcctgccttcatctccaaggcccgagggctccagcatcccgacgcggcttccggcgacacgggcaaagagagacagaggcgagtccgagctggtgccagcgtgtccacatgtggcactgtcgtcccccaagagcacatgcaggcagcgtgtgtctttgaggccgtagggggcgacgacgagacggacagtgatgtccaggcgtgcgcccggggggccactggagacctgccccacaaagcggaggaaaagccaagcgcacctgaaaacctgcgagacagggcctgtgcgcgagtccacgccacgttcagggaggcccgccagaggagccgagaggtttggacaaagtacaccccacccccagcccgccgccggctaggtacccctgacgcaacctcccctgcacccagccaaaacccagtcccgttggctccctgacatccgtggcagccaaaagattcggtgctagaaggcactttccccaggagcggaggaaccggttggccctcaagaatcagagaggaagtgcaggtgggatgcaacaccgcctttcctagaaggccaatgtcaggagcggtgggcttgcctccgcctcttcctggaccgagcgtgcagccatcacttgggccatggagaccgagagagcttccctgtcccacacaggtatggaagcccagagctccaagatcaccacagctgcccaatcatccagaaagaggtgtggagagggaaacaatcatgacgcggaccgccacgaggtttctccctgatggacggggaagtcttctttgtggaagacactgagccacactaagaagccgccaggcttctcagagacggggcagacacagcaagagggaggtcagagcagacgccagagcacaggcaggatacggggggaccatgccaccaccaccggcatccggggaggagtgtcaaacgggtgactcggccaggaaggccagcctttgagagacagacatgcttgccgccccatccccttgccggcttccttctccgtccctgcgtctagctgtggctacatttctcgatgagggcagagggcgacaggcgtgacaaccaccttcttgaagctctgcgggcaccctcctgcgggtggacaatgagcgcctgggaggccgttgtccttggttggggagcgctcgtctggatccagcctagcaaagaggctgctccggatggggaggggatgaaaaccctgcgggtccgacgcccatgcccacgttgcccaggccttcacagacccccaaactggaaccgccgggacgacgactgccaaccggccacacgacccaggcagagacgcggggacacgctgaccagaagaaaggccgacgtgcaagaaacccaccctccggcgcacagggcccatgtgtcccaaggcgcacgcacacacagacggacagagacagaaagagagggcgaccgaaagagcgagaagggagagagacagagagagagagagagagagagagacgtgagagagagacagaagtcggcacacagacacgcactgcgcgcgcacacacacagacacacacacagacgcatccccccaacacacacacacacacacccataacgaacacacacgtacagcagggaacacccacccgcaggcagcccctgaaggtgccgggttctgctctccgcgactaagagccaccggtgagagagcagcccacgggcacacaggcggacctgtgctcgtcatcacaagggctccacttttggggagactcacccgcacaccgtccgcgcacgcctgaggctgggatgccgcgctgcctcgccggcgatctgtctgagttttcttcctcctggggtttcttcctgctggtggaccctccgcgaatcccggcctccggagaccgtcctggtaaatgccctggccaggactggtctcagcccagactcagacgcacgatcacacagggctcctacttcgccaagtgtcagggacccatccccgggcaacggtggctttcactgtgacccaagcggcggcttgggcctcgcgcatgcgcactggcgaggccgactcccccgctccacccccccttactccgcagagtcaggctgcggaccctttaaaaaatggcggcgacgcggcggctgcggggcctggggcggcggtgctggaggttgcggtggcggcggtggcggcgcagcccgaggcggcgggtgggaagaggactgccagaggggcctgcgggagacccagggtcggacccataggagtcctgtggtgaggacctccttgatcgctcttctgcttcggttcccgctgaaggaggagcttcgggatgccggctgggctgcgcggactcctcttggggtccgatgatggatccaaccgggtgatcgggaatggggttccaatgcagtgaggccgaaagggtctcgccggggcacagaaagatccccagggccgcaaggcgtgctgtcggctgcaaaggcaccgacccatgagcccactgcctccctccctcctggcaggagcaggggcctgccttcatctccaaggcccgagggctccggcatcccgacgcggcttccggcgacacgggcaaagagagacagaggcgagtccgagctggagccagcgtgtccacatgtggcactgtcgtcccccaagagcacatgcaggcagcgtgtgtctttgaggccgtagggggcgacgacgagacggacagtgatgtccaggcgtgcgcccggggggccactggagacctgccccacaaagcggaggaaaagccaagcgcacctgaaaacctgcgagacagggcctgtgcgcgagtccacgccacgttcagggaggcccgccagaggagccgagaggtttggacaaagtacaccccacccccagcccgccgccggctaggtacccctgacgcaacctcccctgcacccagccaaaacccagtcccgttggctccctgacatccgtggcagccaaaagattcggtgctagaaggcactttccccaggagcggaggaaccggttggccctcaagaatcagagaggaagtgcaggtgggatgcaacaccgcctttcctagaaggccaatgtcaggagcggtgggcttgcctccgcctcttcctggaccgagcgtgcagccatcacttgggccatggagaccgagagagcttccctgtcccacacaggtatggaagcccagagctccaggatcaccacagctgcccaatcatccagaaagaggtgtggagagggaaacaatcatgacgcggaccgccacgaggtttctccctgatggacggggaagtcttgtttgtggaagacactgagccacgctaagaagccgccaggcttctcagagacggggcagacacagcaagagggaggtcagagcagaggccagagcccaggcaggatacgggggggccatgccaccaccaccggcatccggggaggagtgtcaaacgggtgactcggccaggaaggccagcctttgagagacagacatgcttgccccatccccttgccggcttccttctccgtccctgcgtcgagctgtggctacatttctcgatgagggcagagggcgacaggcgtgacaaccaccttcttgaagctctgcgggcaccctcctgcgggtggacaatgagcgcctgggaggccgttgtccttggttggggagcgctcgtctggatccagcctagcaaagaggctgctccggatggggaggggatgaaaacccctgcgggttcgacgccgatgcccacgttgcccaggccttcacagacccccaaactggaactgccgggacgacgactgccaaccggccacacgacccaggcagagacgcggggacacgctgaccagaagaaaggccgacgtgcaagaaacccaccctccggcgcacagggcacatgtgtcccaaggcgcacgcacacacagacggacagagacagacagagagggcgacggaaacagcgagaagggagagagagagagagagagacagagagacagagagagacgtgagagagagacagaagtcggcacacagacacgcactgcgcgcgcacacacacagacacacacacagacgcacccccccaacacacacacacacacccataacgaacacacacgtacagcagggaacacccacccgcaggcagcccctgaagctgccgggttctgctctccgagactaagagccaccggtgagagagcagcccacgggcacacaggcggacctgtgctcgtcatcacaagggctccacttttggggagactcacccgcacaccgtccgcgcacgcctgaggctgggatcccgcgctgcctcgccggcgatctgtctgaggtttcttcctcttggggtttcttcctgctggtggaccctccgcgaatcccggcctccggagaccgtcctggtaactgccctggccaggactggtctcagcccagactcagacgcacgatcacacagggctcctacttcgccaagtgtcagggacccatccccgggcaacggtggctttcactgtgacccaagcggcggcttgggcctcgcgcatgcgcactggcgaggccgactcccccgctccacccccccttactccgcagagtcaggctgcggaccctttaaaaaatggcggcgacgcggcggctgcggggcctggggcggcggtgctggaggttgcggcggcggcggtggcggcgcagcccgaggcggcgggtgggaagaggactgccagaggggcctgcgggagacccagggtcggacccataggagtcctgtggtgaggacctccttgatcgctcttctgcttcggttcccgcgaaaggaggagcttcgggatgccggctgggctgcgcggactcctcttggggtccgatgatggatccaaccgggtgatcgggaatggggttccaatgcagtgaggccgaaagggtctcgccggggcacagaaagatccccagggcgcaaggcgtgctgtcggctgcaaaggcaccgacccatgagcccactgcctccctccctcctggcaggagcaggggcctgccttcatctccaaggcccgagggctccagcatcccgacgcggcttccggcgacacgggcaaagagagacagaggcgagtccgagctggtgccagcgtgtccacatgtggcactgtcgtcccccaagagcacatgcaggcagcgtgtgtctttgaggccgtagggggcgacgacgagacggacagtgatgtccaggcgtgcgcccggggggccactggagacctgccccacaaagcggaggaaaagccaagcgcacctgaaaacctgcgagacagggcctgtgcgcgagtccacgccacgttcagggaggcccgccagaggagccgagaggtttggacaaagtacaccccacccccagcccgccgccggctaggtacccctgacgcaacctcccctgcacccagccaaaacccagtcccgttggctccctgacatccgtggcagccaaaagattcggtgctagaaggcactttccccaggagcggaggaaccggttggccctcaagaatcagagaggaagtgcaggtgggatgcaacaccgcctttcctagaaggccaatgtcaggagcggtgggcttgcctccgcctcttcctggaccgagcgtgcagccatcacttgggccatggagaccgagagagcttccctgtcccacacaggtatggaagcccagagctccaggatcaccacagctgcccagtcatccagaaagaggtgtggagagggaaacaatcatgacgcggaccgccacgaggtttctccctgatggacggggaagtcttctttgtggaagacactgagccacgctaagaagccgccaggcttctcagagacggggcagacacagcaagagggaggtcagagcagaggccagagcccaggcaggatacgggggggccatgccaccaccaccggcatccggggaggagtgtcaaacgggtgactcggccaggaaggccagcctttgagagacagacatgcttgccccatccccttgccggcttccttctccgtccctgcgtcgagctgtggctacatttctcgatgagggcagagggcgacaggcgtgacaaccgccttcttgaagctctgcgggcaccctcctgcgggtggacaatgagcgcctgggaggccgttgtccttggttggggagcgctcgtctggatccagcctagcaaagaggctgctccggatggggaggggatgaaaacccctgcgggttcgacgccgatgcccacgttgcccaggccttcacagacccccaaactggaactgccgggacgacgactgccaaccggccacacgacccaggcagagacgcggggagaggctgaccagaagaaaggccgacgtgcaagaaacccaccctccggcgtacagggcacatgtgtcccaaggcgcacgcacacacagacggacagagatagaaagagagggcgacggaaacagcgagaagggagagagagagagagagagagagagagagacagagagagacgtgagagagagacagaagtcggcacacagacacgcactgcgcgcgcacacacacagacacacacacagacgcacccccccaacacacacacacacacccataacgaacacacacgtacagctgggaacacccacccgcaggcagcccctgaagctgccgggttctgctctccgagactaagagccaccggtgagagagcagcccacgggcacacaggcggacctgtgctcgtcatcacaagggctccacttttggggagactcacccgcacaccgtccgcgcacgcctgaggctgggatcccgcgctgcctcgccggcgatctgtctgaggtttcttcctcttggggtttcttcctgctggtggaccctccgcgaatcccggcctccggagaccgtcctggtaactgccctggccaggactggtctcagcccagactcagacgcacgatcacacagggctcctacttcgccaagtgtcagggacccatccccgggcaacggtggctttcactgtgacccaagcggcggcttgggcctcgtgcatgcgcactggcgaggccgactcccccgctccacccccccttactccgcagagtcaggctgcggaccctttaaaaaatggcggcgacgcggcggctgcggggcctggggcggcggtgctggaggttgcggcggcggcggtggcggcgcagcccgaggcggcgggtgggaagaggactgccagaggggcctgcgggagacccagggtcggacccataggagtcctgtggtgaggacctccttgatcgctcttctgcttcggttcccgcgaaaggaggagcttcgggatgccggctgggctgcgcggactcctcttggggtccgatgatggatccaaccgggtgatcgggaatggggttccaatgcagtgaggccgaaagggtctcgccggggcacagaaagatccccagggccgcaaggcgtgctgtcggctgcaaaggcaccgacccatgagcccactgcctccctccctcctggcaggagcaggggcctgccttcatctccaaggcccgagggctccggcatcccgacgcggcttccggcgacacgggcaaagagagacagaggcgagtccgagctggagccagcgtgtccacatgtggcactgtcgtcccccaagagcacatgcaggcagcgtgtgtctttgaggccgtagggggcgacgacgagacggacagtgatgtccaggcgtgcgcccggggggccactggagacctgccccacaaagcggaggaaaagccaagcgcacctgaaaacctgcgagacagggcctgtgcgcgagtccacgccacgttcagggaggcccgccagaggagccgagacgtttggacaaagtacaccccacccccagcccgccgccggctaggtacccctgacgcaacctcccctgcacccagccaaaacccagtcccgttggctccctgacatccgtggcagccaaaagattcggtgctagaaggcactttccccaggagcggaggaaccggttggccctcaagaatcagagaggaagtgcaggtgggatgcaacaccgcctttcctagaaggccaatgtcaggagcggtgggcttgcctccgcctcttcctggaccgagcgtgcagccatcacttgggccatggagaccgagagagcttccctgtcccacacaggtatggaagcccagagctccaggatcaccacagctgcccaatcatccagaaagaggtgtggagagggaaacaatcatgacgcggaccgccacgaggtttctccctgatggacggggaagtcttgtttgtggaagacactgagccacgctaagaagccgccaggcttctcagagacggggcagacacagcaagagggaggtcagagcagaggccagagcccaggcaggatacgggggggccatgccaccaccaccggcatccggggaggagtgtcaaacgggtgactcggccaggaaggccagcctttgagagacagacatgcttgccccatccccttgccggcttccttctccgtccctgcgtcgagctgtggctacatttctcgatgagggcagagggcgacaggcgtgacaaccaccttcttgaagctctgcgggcaccctcctgcgggtggacaatgagcgcctgggaggccgttgtccttggttggggagcgctcgtctggatccagcctagcaaagaggctgctccggatggggaggggatgaaaacccctgcgggttcgacgccgatgcccacgttgcccaggccttcacagacccccaaactggaactgccgggacgacgactgccaaccggccacacgacccaggcagagacgcggggacacgctgaccagaagaaaggccgacgtgcaagaaacccaccctccggcgcacagggcacatgtgtcccaaggcgcacgcacacacagacggacagagacagacagagagggcgacggaaacagcgagaagggagagagagagagagagagagagagagagagagagagagagagagagagaggtgagagagagtcagaagtcggcacacagacacgcactgcgcgcgcacacacacagacacacacacagacgcacccccccaacacacacacacacacccataacgaacacacacgtacagcagggaacacccacccgcaggcagcccctgaagctgccgggttctgctctccgcgactaagagccaccggtgagagagcagcccacgggcacacaggcggacctgtgctcgtcatcacaagggctccacttttggggagactcacccgcacaccgtccgcgcacgcctgaggctgggatgccgcgctgcctcgccggcgatctgtctgagttttcttcctcctggcgtttcttcctgctggtggaccctccgcgaatcccggcctccggaaaccgtcctggtaactgccctgaccaggactggtctcagcccagactcagacgcacgatcacacagggctcctacttcgccaagtgtcagggacccatccccgggcaacggtggctttcactgtgacccaagcggcggcttgggcctcgcgcatgcgcactggcgaggccgactcccccgctccacccccccttactccgcagagtcaggctgcggaccctttaaaaaatggcggcgacgcggcggctgcggggcctggggcggcggtgctggaggttgcggcggcggcggtggcggcgcagcccgaggcggcgggtgggaagaggactgccagaggggcctgcggcagacccagggtcggactcataggagtcctgtggtgaggacctccttgatcgctcttctgcttcggttcccgctgaaggaggagcttcgggatgccggctgggctgcgcggactcctcttggggtccgatgatggatccaaccgggtgatcgggaatggggttccaatgcagtgaggccgaaagggtctcgccggggcacagaaagatccccagggccgcaaggcgtgctgtcggctgcaaaggcaccgacccatgagcccactgcctccctccctcctggcaggagcaggggcctgccttcatctccaaggcccgagggctccggcatcccgacgcggcttccggcgacacgggcaaagagagacagaggcgagtccgagctggtgccagtgtgtccacatgtggcactgtcgtcccccaagagcacatgcaggccgcgtgtgtctttgaggccgtagggggcgacgacgagacggacagtgatgtccaggcgtgcgcccggggggccactggagacctgccccacaaagcggaggaaaagccaagcgcacctgaaaacctgcgagacagggcctgtgcgcgagtccacgccacgttcagggaggcccgccagaggagccgagacgtttggacaaagtacaccccacccccagcccgccgccggctaggtacccctgacgcaacctcccctgcacccagccaaaacccagtcccgttggctccctgacatccgtggcagccaaaagattcggtgctagaaggcactttccccaggagcggaggaaccggttggccctcaagaatcagagaggaagtgcaggtgggatgcaacaccgcctttcctagaaggccaatgtcaggagcggtgggcttgcctccgcctcttcctggaccgagcgtgcagccatcacttgggccatggagaccgagagagcttccctgtcccacacaggtatggaagcccagagctccaagatcaccacagctgcccaatcatccagaaagaggtgtggagagggaaacaatcatgacgcggaccgccacgaggtttctccctgatggacggggaagtcttctttgtggaagacactgagccacactaagaagccgccaggcttctcagagacggggcagacacagcaagagggaggtcagagcagaggccagagcacaggcaggatacggggggaccatgccaccaccaccggcatccggggaggactgtcaaacgggtgactcggccaggaaggccagcctttgagagacagacatgcttgccgccccatccccttgccggcttccttctccgtccctgcgtcgagctgtggctacatttctcgatgagggcagagggcgacaggcgtgacaaccaccttcttgaagctctgcgggcaccctcctgcgggtggacaatgagcgcctgggaggccgttgtccttggttggggagcgctcgtctggatccagcctagcaaagaggctgctccggatggggaggggatgaaaacccctgcgggtccgacgccgatggcgacgttgctcaggccttcacagacccccaaactggaaccgccgggacgacgactgccaactggccacacgacccaggcagagaggcagggagaagctgaccagaaaaagactgaccagaagaaaggctgacatgcaagaaacccagcatgcggcgtacagggcacatgtgtgccaagagtgacgcacagacagatggacaatgacagaaagagagagcgagggaaagagcgagaagggagagagacgtaagagagcgatagaagtgggcagacagacacgtaggcgcgcgcacacatacacacacacacacacacacgcccgtaaggcatagagacctacagcagttaacagccacctccaggcagcccctgaagctgccgggttctgctctccgtgactaccacccaccggtgagagagcagccccaagggcacacaggcagacctgtcctcgacatcacaagggcaccacttttggggagactcaccggcacaccgtccgcgcactcctgaggctggattcccgcgctgcctccccggcgatctgtctgagatttcttgctgctgttgttttttcctggtggtgtaccttccgcgaatcccgggctccggagaccgcggtgttaacttccctggccaggactggtctgaaccccgactctgacgcactatcccacagagctcctactttcccaggtctcagggacccatcccggggcaactgtggcggtccctgtgaccaaagcggcggctcggacctcgcgcatgcgcactggcgaggccgactcccccgccccccttgttactccggagactaaggtcgcggatcctttgcaaaatggcgccgacgctgctgctgctgggagtggggtgtcgacggccgcagcagtgttggaggtatcgtgtggggtgaggaatgggagaggttcctgtgggagacccagggtcggacccataggattcccgtgttcaagacctccttgatctgtcttctgcttcaattcccagtggcggagtagcttcagggcgccggctggcctctccggagtcctcttcggatctgattatggatccgacccggtgatcagtaatggcgttacgatgtagtgaggtgggaaaggtctcgctggggcacagaaagatcccatgggccccaagatgtggtgtctactgaaattacaccgaccagtgagtccactggctccctctttctttggtgaaaccgtggcctgctttaatctttaaggcccagggggtccggaatccctacactgctttgcttgacatgtgcagagagagacagaggcgagtccgagggggagccagtgggaccacaggtggcactggtatcccccaagagcagatggagtgagcttgtgtctccgaggccgtatggagagatgctgagacggacagtggtgtcccgggatgcgcccgcggaccactggagacctcctgcacaaagctgaggaaaagcctagcacaccggaaaacctgcgagacagggcctgtgcccgagtccaagccacattcagggacgcctgccagaggagccgagaggtttcgacaaaatacacctcaccttcacgccgccactgggtaggtaccactgatgctgcctctcctgcacccagcaaaaccctgtcccttttgcttcctgacatccgtggcagccagaagattcagtgcctcaaggcactttccccaggagcagaggagccagatggccttgaagaatcagagaggaaaggcaggtgtgatacaacaccacatttcctagaaggtaataggccagccaccttcgcctcctgctcttcctataccagtcaggcagccatcacttgtgacatggataccaaaggagcttccttgtcccaggcaggtatggaagcccagagctccgggcttcctgcccaatcatccagaaataagtttggagagggaaacaatcatgaaacccatcctcacgaagtttctccctgatggactgagaagtcttctttgttgaagacattcagccaaagaagcctctaggcttctcagaaacagggcagacagagcaagagggaggacagagcagaggccagagcccaggctccatacagcacaatgccaccaccttgggcatgtgtggaggagtgccaaaccggtgatttggccaagaagaccagtattcgagtgcagagatgcttgctacatctcctacctggcgttcttttctttccttgtttccagcagtgtctagatatctcaatgagggcatacggcgagaggagtgagacccatcttctttgaggtcggtgggcacctctcatgcaggtggatattgagcttctgtgagaattttgtcctttgctggagtgtggtcgtcttgatactagcaatgagcccgctcacgatggggagccgatttaatcccctgcgggtccgacgcaactccccacgttgtccaggccgtcacgaacccaaactggaaccaccgggaaaacgaatgataaccggccagatgacccaggcagagacgcggggagaggctcaccagaagaaaggccgtacaagaaactgcccttcagcgcatatgcatccaaacacacacgcacacgagcacacacagacggaaacaggtagagattgatagagaaaggagacagagagaaacaagagaaagaaagagacagaacccagacatactgcagtggcacagtaacattcatccccaggcagcccctgaagcctcagggttctgctttccgcgacaacgaccctggggtgagagagcagcccttgggcatacaagcagacctgtcctcgagatcgcaaaggcacgacttttggggaaactcactggcacaccgttcgcgcaggcctgagcctggaatcctgcggtgcttcccaggcgctcctcctgaggtttcttcctcctggtcgaccctccgcgaatcctggcctccggataccatcctgtcgaccccgtggcgaggactggccttagcccggagttcgacgtgctgccacagaaggctcctccttcgcgaagcgttcaaggactcatctccaggcagcggtggcggtctctgtgacttgagcatccgctgatgattcgcgcatgcgctttggcaaggctgactgcgctctactctgggtcaggctgcagctcctgaaaaaaaattgctggggctgtgtgtgtgaatgggggtgtgcatgtatgtcttcggacgaacgtcccctgttcgctggagggcggtttcttgcacgtcgtcctttttggtgagcctctttctcggtctctgcctgggtcgtgtagccggtcgtgtgaccggaaccggcagtcattttcctggcggctgcacttttagtttctgaaggccttggcgaggtttggtgctgtgtcagacccgcaggcgttcaagtcacctgcccattctgagtggcagaaatcctaaaaatcctccacccaggagcagaggacccggatgtctctcaagaattagaaaggaagtgcagattattgcaaagcacatggtagctaacactggataaatgagatgaacattggtttgctaattacccatatttacgccccagggaaggagggcccagcacaccatatgggataccgtgttgcacttaggaacagagtaatcaggtggaggctataccaggaggctttgtagtagcaagagtatgggaggtaacccctggttcttgaaggagggtgtgattggcctgtttgaataattctgcaggctggctggaacctgacgcccgctactatgcagtaagcaggtaatgtgccggtcctctgagggaagtgattcggctagggcaccttattcaaaggagtacaacagggcaaggaatttgcagttaatccattcaggcctccttgttttccccccaatgtcagggcacatataatattgagccttaatcttaggtcttataccacacttgaccccttgatgtcttgacatctcttggcgatactgatacttctagagtgtagaactgttactggatggaaggtcttgactgtaagttgtccacgtttctggcttgttgaagaaagcattaaacaaactacacgaagcaacaaaagaacgaagccacgaaagaagaaagaagcaacgaaaccgcagatttatttaagcgaaagtccactctacagagccagagccggctagagcaagcggccgaagagcccagattacaatgttctttagagtttttattaagccaaagaatttgataacaccaataagtgccctttcgaggcctccaattggttacacactgtgaaggattggcccatggctgaactcagaggctgaactggagacttctgtgttgttatcacaggagtgaggatgtggcctgtgtgctgcttaacctggcctagaacttgctgcacctgctgttcttttgcttccaccttaacccttagtttatgctaattttctattctcctgcctcagaagtgcctccttaggaggccaagcaggctcttacctgcttcaggtgagcaggtaaccaggagggagcggaccacagttgctatcatgtctatgattagtgtttggaaacctgtgcagagcctttggctccacttggatgggatagccaagagaacagatatgtggtttttggatcatgatatgtctgaatatttgtgtaaccttatgtattaccatcagtttttatttgttaggcatggttattcttgctcgtattattattattattattattattattattattattattattttgatagagtctcactctgttgccaggctggagtgcaatgctgccatattggctcactgcaacctctgcctctcagattcaagcgattctcctgcctcagcctcccaagtagctgggaatacaggcacgtgccaccacacccagctaatttttgtatttttagtagagacggggtttcacggtgttggccaggatgatctcagtctcttgaccttgtgatccacccaacttggccttccaaagtgctgagattacaggcataagccatcatgcccagccaaaaatttttttaataaaataaaatatgtgagtattggccaggtgcagtggcttatgtctgtaatcccagcattttgggaggctgagataggaggatcacttgaggccaggagttcaagaccagcctggacaacacagcaagaccccacctctaaagaaaaaaagtgtgtgtgtgtgtgtgtgtgtgtgtgtgtgtaatatgacataaacaagtgtgggtatatcaatcattgttcaccagttactgatgctgtataacacaccactccaaacttagtagtataagacaaccattttactgtgctcactgattctgtgggttaggcatttagagagctcacagaagagatggtgtgcctctgctcctgatgtctctggcctcaaccaggaggattcaaaagctgggaataacctgatgcctgagggctgcaaacctatgaagcctgctttgcacacatgtctggcacatgcagtgggaggactcaaagactcagactagtagcctccccacatgacttggcttcctcatagcatggcagctcacagcacttggaacttcttacatgatagctcgagacttcaaacacaggagtttcagctaatgaggtgaaggccacagtgcctcttatgactcagccttgggagtcacacagcattggttacaaacaataaacaaatccagattcacgggcagaggagttagactccacccttaaagtgggaattgcaagattctagaacaacatatgagacaagcctattgttgcaaccatctttggagaatacaatctgcagcaatcacctttggagactaggaaaccaatgcagtattctgaaactcgtaattctgaaaactaatgaatatgaatggaaagaatcaagcatttatcctccctttcctacacatgctatccctctaagtaatcagatagttgatgtgtggggattttatttttataaaaggattcctgtaatggaaatttcagtaatggaaataaaaggattccagtaatggctgaaagagagacacaataagaaagtgatcattttgcagctcctaacaacaacgaatctaggcaatgatcatgaatgaatgcatgacattatgcaaaaggcaatcactttacaatggataaatcacattgatgacacttaagcccactaccaaatctaatcacaaaaacagtgacaagcagaccttgccaaaataattgaacttgaatttgaccaagcttctagagcagaatttctcaactctgacactatttacactttggaccagatgattctttgggattggagaaggctgtcctgtaaggtgtatgggatgtttagcagcatcctggcctctagccaataggtggcagcaataccatccttccttgcagttgtgacgaccaaaaatatctccaaacattgccgaatgtcttctagaggtaaaaataaaaacaaacaaacaaaaaacaaaaccacaactggttgagaaccactgctctagttaatgaccagatattttagagaaaatatacagcatctaatttgttaatcagtaccatgggggtgtactcaaaggcagtatgtgggaactctatatgatctagtgtttgatttctccaaaatataaatagcaagaaaaaagggaagtcaatagattaaaagacatataagagccggctgggcgcagtggctcaagcttttaatgccagcactttggaggccgcggcgggcagatcatctgaggtcaggaaaagttcttaaaagaactataagaaaaagagttttaagaaaagttcttaaaagaactatatttcatactgaaatatttatagatgaaatgtctagaattttctctaaaataattgagtgtaaatggagatgaagcaaaactggccatgtgttacttgttaaggctgggttcactgtactaggctctctgcacatataatgctggaagtatccataataaagagcttgaatttaaaaaaaaattacctccttccaagtactactcaaatcagcaagcactaatttggaaggacatccataaggtcttccctagaaacacaagctaaaaaaaaattacatataattctagtaaaggcaaaagggaacaaaagtcactcagtatatgtgtgtgtgcatgtctgagcaaggagagaggtaaaggaaacttaccagacttttaaaatggataaccttggggagttgagaatataaaataacaagaaatatacatatatttgtctctgcccctagctcctggtctagagctccttaaaacccttgggtactaggaggatcatctgttctaatatctggtctttgaccctagttcctgacagagttctcaaatcccttgggatttcctggctgataggaacatcttatgttctaatgaggggacttcttggtgggctcctggatggccaagggatgtgatatgagggttggaattttcagccccaccccttgacctccggggaggggacagcagcttaaggttgagttgactgacaatggccaatgatgtcatcaatcatgcctatgtaatgaagcctccatgaaaatccaaaaggactgggttcagagagcttccagattgctgaacacgtgggggttcctggaggatgatgtgctggggagagagcattgaagcccaatgccacttcccacatattttgccctaggtatttcttcatcgaaaacctttgtaatatcctttttattgcaaaaaaaggatgcaatatcctttttattactctgttacaccgggtcctcttttggactcctctggctggaaggaaagcgtttctctcataatttttgctccctgaacctatcacacagctctgagacttccttccttccaaagccagaagataaagggggaaaataccccagcaaacctgtggtcatcacgtccattcttcacgtttttaactcccttcacatctgcctgctattatttgtatttctgagtcttcaggtggtttctttttgtattcactctggggtgttaagtagaaatcggtgagagagatgctgaaatgtgcttatctcatcttggccagtaatagaagtctgccttgtatatgttattgtatgtatgtgtatatattaagttgtatatacacatattaaatatatatacatatgttatatttatatacccatacatttgtttcctcatgcaatttgtcccagcagaagtaaaaactcataaagatataagtaaaagaatatttacagaagcattatttttggtggcaaaagtactttaatatcctaaatgctcgtataatggaagataatttaactcttacaaagaatgagttagctctttatctactataaaggtatcctaatatctttatccctgaactgataactgtggcagagatcgcgccactgcactcaagcctgggtgacagagcgagactccctctaaaaaacaaacaaaaaaaatagtttgtgggaccaattccaatccagtccaggggagcacacactggcgaccaacatcccccatcaggccccttctgggtcgagagaatgcgcctggaacagactgggaaactccagcaggcaaagtaaggtgccaggaataaagacactgcctgacacattctccatgttccctacacctactcctctccccaccacgcttccatccagctccaattttgccctttccccagtagcctcagattgaaaccttgcaaggaagaagccgattctcaaagtcacaggcttaggaatccgagcaacaaagaaaaatgagcccctgctcccccaactcccccctactcccctcagcactgctgccctgcacctgccccctcctccataatttgaactgtcctcccagaagctggagagacggcccgcctgtcaggaaagaaaggaccagcatgcggcaaatgcctggggtatgtaggagcagacggcgagattagcgcagggatgtaagaaacaagaccaaagaagactccgcggcagacggcacactaggccttcataggggcgtgcgctggacaggacctcgccagttaccgaaagaattgtctgagaaaggctctgatctgacccgaaaggcccttggttcccacggcaacgcctcagcgtctggcagtaacaggctctgtgcccgggctctctggatctgcaggtcccgcctccgccagcctctcacagcccggaggcacctcccattggcgcctgacgggttggttagggcggcttttcttccggctgtgacaaatccagcctgaggagcgctcctgtgtctttcttagttgtttcttcccgcccacctgcccctcaaagccacaacccacttgcacaccaccgtgtggacacctaaaagcgaccgtctagatctgaaccgcgctgagggaatggtcagcttctctcccattagatggcttggcccaaaggacctagcgactgcccagacaaaaatttcttctgacatgctgcatgtgtctgtggtctctaagagtcaaaaccaaagccaaaagaaaaagacaaccccgccccccgcgaaacaacaacaacaacaacaacaacaacaacaaacaccaccaccaacccacctttcacgagaggagtccttgagaagagcctctccagccagaaccaggtaaaggaatctgtgcacttggcgggacccagaacacacagtggcagggacttgacagccacactcttaccccatagaatctccaccactgacacacagatcaggatgtgtcaccctgagagatgacaccacagttctgggctttcacagattgattccacactctctcactgattccacacacatcccattactcacaccagattccctcatcactgaccctacatacctacaatcattgattccatggacctcatcactatcccaaagaccacctatcactaatctacagaccctcccctgtcaccccagggacctcagatttcccatccccgattccaggatgtatagaacctcatctcttacccccacagacctattgataagagaatacactcatgggagactgtgttgaccattttacacatccattgtgtgtgtgtgtgtgtgtgtgtgttgattaatggacttaggtaaactttagcattttggtaggcaatgcagtttttcaatgccttttcattttctttctttttcttgtacatctttaaaggccttactccaggcagtgtgaattgcaatttattaatgcctatcccttattgagtccttgtcatacatatttgttattgatcataattcacaattcttataactcagagacaccaaagactcgcataaaaagaatggatgtgggtttttatttatttatttatttattttggtttctgtagattacaaaagtcattcatttatatcaagtcacgaagtgtatgctttgttttctaaaaaaaattctaattaaaaaaaattttttttagacatggtctccctctttcacccacgatggagtgccgtggtataatcatggccaccacagcctcgacctcttgggctcaagagatcctcccacgttaacctacctagtagctgagaccacaggcatgcaccaatacgcccacctaattattattattttttttatagatatgtgggtctcactatgttgcagagacaggtctcaaactcctgggctcaaatgatactcccaccttggcctcccaaagtgttgagattacaggtgtgagccactgcacccagctgataaaatcttaaaaagagtaaaatactttggcatctaatggaaaatttccactgagatgatgcatcagaaattaaggtagaataagatggtcctagggcatctgaaacaacggaaactcaatcttggactgggtatggtggctcatgcctgcaatctcagaactttgggaggaaaaggtgggggactcacttgaggtcagaagttcgagagcattctagccaacatggtgaaacactgtctctactaaaaatataaaaattagcctggaggttgcagcgagctgagatcgtgccactgcactccagtctgggcaacagagggagactctgtctcaaaaaaaaaaaaaaaaaagaagaagaagtagaataaacaaaatcttaatttattcatcaagtataaaaatgtggactagactctggaggaataatacataaaaagacataggcactatttttttttgaagttttattgagaaatattaataacatatcacagaagccacccattgaaagtgtaaaattcaacggttttcagtatatttgcacagttgtgcaaacagcaccacagtaagttttagatcattttcattaccttgaagtaaaccccatatccctccagttccccccaactcccctaaccccgggccaccactaatctactttctgtttctatgtattggtctattttggatattttatttaaatggaattacacaacatgtggtcttttgtgactggcttctttcacttagcatcatattttcaaggtttattaaatgttgcatgtgcagagggggcactttacataaggataaacctgggagtgggtgcgtactgattttgaaacttcactccaaaattgtaaaagggaaatgattgatttcaaatagaggaaaaacctgttcaagctaaaatcctccgttttcaccagtttgtaatgtggggttttattgcgaagaatggcaaggtttttatacatattttctgcaaattctccctgtgtttgggaacagtcacagaatgtggaggtatgggcttctggactctgtggctggagattcgagtccaggagaactcaagtctcagggtaggcagagaataacagtgcaagagtgccaatggaaccctttgaaatggaaaatttaaaatgttccctcccaaaggagtcccagataaccacacaaaagaggagtttgctgagtcagtccgtcgcgattctccaataggatgcagacagactgggaaagaagaaagtttatttctgcaaccgattacatggagaagggccaagtaactcaccagaccaactcaaagttacaagtttttttctagtgtttatagacatcttaaggtccacggtatgtgtgggactgcacctacaagcagaagtgttgcattcaatcaacatctaatctttaactagggcctagggtctggaaagatttctctagagtcttggaaagtttctgaatcttaagacaggctgaggtgaatgtgtaagaatgctattattattcgatcagactttaggatctgagaagaccaaggcagggtcttaatgggttcgttttcgcattccatccctgatactcaggcaccagtttctccatttcttcaacgtttaacttatgcattcatcaaaattatagtaaagggttagtggaaactgttctggttgctaatggaaacctggcctgccacactgtgatcggaactaaagcccactacagaacactgaaaatgcctgcaaaacactgactttactgacaagtcaattaaattacagaaaagcaagttcacctccctgcccgctctgtcctccggaattgctaggtagaaacgtgcacattgtcctaggttcagttttgcaaagacggagtccgtcagagaaagcatttgtttgatttcatgcatttgtgtttcctttgtccatttcctttatatttatttatttgtttatttatttttttgagacggagtttcgatcctctcgcccaggctggagtgcaatatcgcgatctcggctcactgcaacctccccctcccgggttcaaacgattctcctgcctcagcctcccaagtagctacgattacaggcatgtgccaccacgcccggctaatttttgtttttttagtagagacggagtttcaccatgttgcccaggatggtctcgaactccagagctcaggcaatccacccgcctcggcctcccaaagtgctgggattacaggcgtgagccactgcgcccggcctattttattttaagacggagtctcactcggtcgcccaggctggagcgcaggggcgcgatctcggctcactgcaacctccgcctcccgggttcaagcgattcttgtgcctctgactcctgagtagccgggattacaggcgcccgccaccacgcctggctaatttttgtatttttagtacagacggaggtttcgtcatgttggcggccggactggtctcgaactcctgacctcaagtaatccgcccgcctcggcctcccaaagtgctggaactacaggcgtgagccaccgcgcccggccccatttccttttattttattcttttcagacggagtttcggtcttgccgcccaggctggaggggagtggcgcgatctcggctcactgcaatctccacctcccgggttcaaacgattctcctgcatcagcctccggagtagatgggattacaggcgcacgccaccacgcccggctacatttcctttattttattttttataatttactaacctggttttttttttttttttttttttttgagacggagtctcgctctgtcgctcaggctggagtgcattggcgcgatctctgctcactgcaagctcctcctcccgggttcacgccattctcctgcctcagcctctccgagtagctgggactacaggcgcccgccaccacgcccggctaattttttgtattttcagtagagacggggtttcaccgtggtctcgatctcctgacctcgtgatccgcccgcatccgcctcccaaagtgttgggattacaagcttgagccaccgcgcctggcactagcctgttttttgataacaagactggcggtgcacaaagttgggtctctgtgttcaccgggaggtgggcattggccaggtgggacggtctccagcgcctggtgcaaatctccaccaaagtgcaggaaacagcatcaactattactgcaaagttttggtttggcgcagcgggtagacgttccagcgctgaaatgcgcaagaaagtttttgctgcgcatgtaggcgggtcaggcccaagcgcttcttattggctaatgtggagcgaacctgcacatccattgactgaaagctccgtctatttgaggctaaccgagagcgtcccttccttttgtgttgcctggaaacagactgtccgcctactaacatctgatcgcgtttcccattggtcgccgtttccggaagcccgccctcccgtttccggaagcccggcacaggctgggtctgcagatggcgtccgagtgcacagtggccagtgtgattccgcagtcttgggctgttcggccaagcgcccaccggacgtgggacgctggagggtcagcagcgtggagtcctggccttcagcgtccgcggctgggaaatcggccatcgccacggcgggaactaggactggctgcgtcccggcccttccccatccgtccaccggactcgtgggcgcccgcactgactgtgatgtagtttcctgacctctgacacgtattgtctcaagattaaaggtaaaaacgggactttttcagcccactcgggtaaaatgcccttttatttctaggcaggtgttttgttgcagaacgcctcgaagggagggagtgatcagtaggttgaagtttattaaataaaatacattactagtttatattatgtttataataaagcaccccaacctttaaaaaaaatctcactttttgccagttgtattatttagtggactgtctctgataaggacagccagttaaaatggcattttgttgttgttgctaatcaaaccaatttttagttttggtggttgtcctaacagcagcaacttctcaggctttatgaaatcatatttgttttctttttttttttttttgagacagagtctcgctctgtcgcccaggctggagtgcagtggcgtgatctcgagtcactgcaagctctgtctcctgggttcacgccattctcctgcctcagcctcccgagtagctgggactacaggcgcccgccaccacgtcccgctaattttttgtatttgtagtagagacggggtttcactgtgttagtcaggatggtctctatctcctgacctcgtgatcctcccgcctctgcctcccaaagtgcagggattacaggtgtgagccaccgcgcccagcttataaaatcatatttcttgtggaaaatttctgtgaaaggcacagcgagttagtttggaattgttttaaaggaagtaagttcctggttttgatatcttagtagtagtattttccccaatgtctttgaaatctaatttttggggcacgtatgtagagtaacttttgtgaaagaaacaaccagttaaggaggttttgggatttcctttatgaactataatgctggtttagatttttttttttttttgagacggagtttcgctcttgttgcccaggctggagtgcaatggtgtgatcttggctcactgcaacctccgcctcacgggttcaagctattctcctgcctcagcctcatgagtagctgggattataggcatgcaccatcatgcctggctaattttgtatttttagtagagattgggtttcttcatgttggtcaagctggtttcgaactcccgagcttgggtgatccgcccgcctgggcctcccaaagtgctgggattacaggtgtgctccactgcagccggcatatatatatatatatatatatataataaaaatggtaatgacactatctcctaaatcctttaaaatgttaattggtggatctctgacttttgtagtatttatttcatagtgtgaatgagacacctataggcggcaggtctctatcttcatgaagtgtgaagatttggtgctttataaaatagcccccacattgttcataggccttattcttgattctcagctcccctctgcttctgacattgttactaaaattaagctatgtttttgtggttatgtgagagctgtggaaatgtccagcattagccactaatgtttctccttgatatttctccatatcttaatactgaccctcaatccgttactcagatgggtgtccttttcctggatgtctggaaactaagaccggctatccctctgacctccctgctgaacaaccatttttttcctctctctcttctcttgtctacacttgagttggtaacctcagctctttcatgagcagccttgattcctttgactccctctaactcagagtttattttatttatttatgtttttttgagacggagtctcgctctgtcacccaggctggagtgtagtggtgtgatctcagctcactgcaagctccgcctcctggggtcacgccattctcctgcctcagcctctcccagtagctgggactacaggcacccgccaccacgcccagctaattttttgtattttcagtagagatggggtttcaccgtggtctcgatctcctgacttcgtaatccacccgcctcggcctcccaaagtgctgggattacaagtgtaaaccaccgcacccggccataactctgagtttattacctgcagttccatcagccaagtttagggcccatgagaagggcccatgaatgaaattttcacatacctctagccaaaatatagtgtttccttccatcttgaatacaggctgtagagcccttgggtatggggcattattagcagtcagaccacagcagtttttatgtcatctgacagcatctccaaatagccttcatggttgtcactgcttcccaatgacaattccaaataacagttcccagtgatgatgtgctacttgctattgttacttaatgtgttaaagtggctgttacagacactattactatgtcaggaattacaccaaaatttagtagctcaaaccatcattttattatgtttgtggattctcatgcttatagtcaggatttcagacatggcacaagggtagcccacttgtctctgttccgtgatgtctggcctcagcacagaagactcaacagctggggtctggaaccatctggaggcttgttccttcacatctgatacctggcttgggatgttggaagagggggctcagctgggactgagtccctacatgtagtgtttccatatggccttgacttccttacagcctggtgtggggaaaagaaagagggatcagactgttactgtgtttgtgtagaaagaagtagacataagagactccattttgttctgtactaagaaaaattattctgccttgagatgctgttaatctgtaaccctacccccaaccctgtgctcacagaaacgtactctgttggctcaaggtttaatggatttagggctatgcaggatgtgctttgttaaacaaatgcttgaaggcagcatgcttgttaaaagtcatcaccactccctaatctcaagtacccagagacacaaaacactgtgtaaggccgcagggatctctgcctaggaaagccaggtattgtccaaggtttctccccttgtgatggtctggaatatggccccgtgggaaggaaaagacctgacgttcccccagcccgacacctgtaaagggtccgtggtgaggaggattagtaaaagaggagggcctctgcacttcagataagaggaaggcatctgtctcctgctcgtccctgggcaatggaatgtctctgtgtaaaacccgattaactgctctttaatgcaccaagatttttatgtatgtgcacatcaaagcacagcacctttttcttaaccttgtttatgacacagagatattcacatgttttcctgctgaccctctccccactattaccctattgtcctgccacatccccctctctgagatggtagagataatgatcaataaatactgagggaactcagagaccagtgccagcatgggtcctctgtatgctgagcgccagtcccctgggcccacttttctttctctatactttgtctctgtgtctctttcttttctcagtttcccgtcccacccgacaagaaacaccctcaggtgtggaggggcaggccatccctttcacctggcagcctcagggtagtcagaattcttaggaggcacagggctccaggtcagatgctgagtgatcttttatgaggtagcacagcaaatccacccaggatcggggagagaggacatcgattctgcctctcaaagggaggagtggcaagaaatgttgagccattttttaaaactaccacagcaacatgcctattaatatgtcagaaaaaattaaagcatcctgatagctgcatttctaagtaattggtctcctttgaaattctgtgaattgtgtttttggtagtatatggcattattctgaggaggggtcaaagactctcccgtatgttagaacggtcctgcacagaacaggctaacccccacccacgtcccccagtgtttgaaatgcatagtgtttgctgtggtttattggtcagggcaggagtttctcatttaaattggcctgtaactttttttttggtctgatttccttctgtttgtgctgatattctcacctcaataggaatcaggagcttcttttgctgttcttctgttttggatgcattggaaggtaagtttccttgtgaaccatattttggactcattttgtaggctttgccaaatggcctttttacgctcccattttgcattttctttggatattctcatagattctcagggatattttcatattttactattcatgaatttagaagtgtgtttactttcctgagttttcattttcttctttttcttccgttgtatgtaatttacagagcaaatacccaccagagagaataccgtaagggatgtggaaagtgagtttctttgcgcttatccagtgattgattttcagtcaatgagcattcagtatatgcctgggactctggctttatttattagctttctgatgctgaacccatcagtgaactactctgtatatttgattcatcatgaaatggtgacacccagggtggctgatttccaggtttacatcagttgccccaggggaagtgcctggcccttgtctggttgttgctgctctaactttgccctgttaattgaagaaatgcagctgtaaacacttcctggggtgttgctggcatttactgtcctcacagtttacagggaagcccatattttcagcctcttcctctgctttctgccatttctaaaccatctcacccgatctggtgtaatcttcattgtgtgtgagtttgcacagatgtaatttgggcctacatgtgtccaaagcctaatgcccacctcccacctccacgaaaatctggagctcaggacccactaccctcccccacccactgcaagcttgaacatttgatggtggaaaccccgccctgagtttgtattatggtgggttctcttgggtcttgttctctgtgggtctgtcctgcgttatagtgtgtggagccggggggattttcactgtgttcctaaaggagggtcacaaggagttgttgggcaaacggtctgatatttcctttttttttttgaaacagagtctcactctgtttcccaggctggagttctgtggcaccgtgttggctcactgcaacctccgtctcctgggttcaagcaattctcttgcctcagcctccagagtagctgggattacaggtgcccaccaccacgcctggctaattttttaatatttttagtggagacggggtttcatcgtgttggccaggctggtctcgaactcctgacctcaggtgatccgcccgcctaggcctcccagagtgctgggattacaggtgggcacctggccaaggggctgatatttcttaagggctttccccaagaaggaagaagccaaacctactcaggcaaatcttgtttatttattcttctaggtccagatttggaacaagtctctctagagattgaacaggtaaggctcacctttcaatagttacaccaagaaaggcctagctgatgacttaagctatggttttgggctgcacgagagtggtcaggtggacagtagggaagtctacatgtaacccaaacggaaaagagaaaaggcccctgagaaatcaggggaaagtgccacagtgtctctttcttgatgatgtcactggcatgtgggttaccttcccactgtgtcccccaaaggacatgaggccacaaactgaagtgcccatgaacagaggagctgtggggacggtggtttgatcgctccgttcaaatgcacaccccggtgcatgtgcatctcttctgatgcagggccccagtgggtaagctctgtgcttctccacacagtggatcaggagtggaaacattctgtctgtttagcgcttgatggtttggtggtgacctcatgtcatggtgattagagccaatgatcctaacagtttaaaattgttgagcttgtgggtaggtatttgggagatagtatgtgtgttacctagtgtttgtcatctgcagtggttttgttactttttgcataaactgcggagaacgtttactaactgcagatgatagagaaatcaccagtcactctaaaatcctcccatttcttggtctagagctgcgcctggaacccgccgcagggaggagacctgaagaccagaggaaacacagcaagtaggccctttaaaccactcacctgtgttgtcttctaatttattctgttttattttgtttccatcattttaaggggttaaaatcatcttgttcagacctcagcatataaaatgacccatctgtagacctcaggctccaaccataccccaagagttgtctggtttttttaaaattactgccaggtttcaactgcagatatccctggaaggaatattccagattccctgagtagtttccaggttaaagtcttataggcttcttctgttttgaggaggagttcctgtcagagaaaaacctgattttggatttttagctttaatgcttgtgaaacgctataaaaaataatattctacccctaacattaaagtactgttagtgagaaattaaaattccttcaggaggattaaactgccatttcagttaccctaattccaaacgttttggttgttagaattttctttaatgttcatgaagaagtgttttatattttccatcaagattgaacctctctctcttttttttttttttagacagagtctcgctctgttgcccaggctggagtgtagtatggcgatctctgctcactgcaagctctgccttccgggttcacaccattctcccacctcagcccctggagtagttgggactacaggctcatgctaccacacctggttaattttgtttttgtgtttttagtagaaacggggtttcaccgtgttggccaggatggtctggatctcctgacctcgtgatctgcccacctcagcctctcaaagtgctgggattacaggcctgagccactgtgcccggctgttttttcatttctattatgatttgttctgtggaatgtcagtgacttagcggtatgtttttcacatttttataaagctgaatagttctgtatgtcagctcagcacccctagtgtcagccatgctactctcctgctgtgcatagatgggggcccgtccacacccgaatctcctgggttcccgctgtcagcacccgaaggtacccaccagatgtgtctgtcgcttccctccatccacctctattgtggttctcatgtttctgcctccctagagaccatttctctccagagcagtgctttccaatagaaatacaatgccagacacatacgtcattttagattttctagtagtcactttagaaaagttaaaaagaaacaggtgaaattaatgttttatttcacctaaaatgttagcattatccaaaatatcacttcaacatcttatcaaaataaaaattattaatgaaatcatttactttttttttttttgagacagggtcttgctttgttgcccaggctggaatgcagtggcaccagcatagctcactgcagtctcaaactcctgggctcaagagatcctcctacctcagccttccaggtagtttggactacaggcacacaccaccatgccatgctaattttttttttttaaaggctgggtctcactctgtcagccgggctggagtgcagtagcacaatcttgactcactgcagcctcgatatctggggccgaaatgatcctcccacctcagcctcccaagtagctgggaccacaaacatgtgccaccacgcctgaataatttttgtatttttttgttaagacagggtttcagcatgttgtccaggctggtcttgaactccagagctcaagtgatccacccaccttggcctcccaaagtgctgggattacacgcgtgagccactgcacttggcctgattttttttttctgaagagatgaggtcttgctatgttgcccagaccggtctcaaattcctggctcaagcagtcctcctgtcttggccttccaaagtgctgggattacagatgtgagccaccacactggcccattctttcttttatactgagtattcagaatttttttaaaatgtgttttccacttacagcatttctcaggttggactagccatctttcaagtgctcagcagccacatgtggcaagtgcctgccttattggacagcacagctctggagggtgattttatgtacatccccactgctctctctgcctcctttattcccatctaccccacacccctgcagtctgtgactatcgtgtccctcctctcttcctgtctcttgtaatcctttaatatggagaattatttccaattccttaacatcctgcctgatttttttctgtcttacattcaagggtcacagttttcctctcaccctcatttcagtcttttcccataacatgtgacgtgcctttttgtcttggttgggtatttatttgcaatacaagaatgattgttttctttgatacattagtgactcacatacttttcatgttttttgagtacctctttcttgaaagaatttcaaattctaaagttaaattagaaagctttttttttttttttttttttgagttgtagtctcgctctgtcgcccagactggagtgcagtggcgtgatctcatctcactacaaactctgccttccagattcaagtgattctcctgcctcagcctcccgagtacccgggattacagatgtgcaccaccatgcctggctaatttttgtctttttagtagagccagagttttgccattttggctagcctggtcttgaactcttgacctcaagtgatctgcccgcctcagcctcccaaagtgctgggattacaagggtgggccaccatgcacaacctagacagcttattttattttattattataattttttttttttcgagatgaagtcttgctctgtctcccaggctggagtacaatggcaggtctcggatccctgcaacctctgcctcctgggtccaagcagttctccctgcctcagcctctcgagtagctgggattacaggtgcccaccaccatgcccagctaatttttgtatttttagtagagacagagtttcaccatgttggccaggctggttttgaactcctgacctcaggtgatccgcccacctcggcctcccaaaatgctggtattacaggcatgagccattttccctggccaggaaacttatttcaaaaggtgtgtatagagccccttatgtttctacttgatttttaaatgacaggtctatatgttttaggatgtaatatctcactgtgtgttgctttgcatcattgaacatttttggtaattatttttattttctatatattttagagatttcattaaactaatacggaatttcatattcaggggcaggcatagtggctcatacctgttttcccagcactttgggaggccgaggcgggcagatcacctgaggtcaggggtttgagaccatcctggccaacatggcaaaaccccgtctctactaaaaatacaaaattattcgtgtagtggtgcaggcctgtaatcccagctacttgggaggctgaggcaggagaatcgcttgaacccggaggcagaggttgcagtgagccgtgatcttgccacttcactccagcctggcccacagagcaaaactcctcaaaaaaaaaaaaaaaaaatcatactcgctcgtatcaaaaatgaaaatttatttttacaaatttctatgtgagtgatagaattattttaatgtcagaaaggttcataagaaatgggtgtagtgattgtgttctttcctgtgctcgaatggaaaatgatgagggaacacaatgttagagttgcagtgagaaggggcggaaagaccaggtgcggtggctcatgcctgtaatctcagcactttgggaggccaaggcgggcggatcacctgaggtcaggagttcaagaccagcctgaccaacacggagaaaccccatctttactaaaaatacaaattagctgggtgtggtggtgcatgcgtgtaaccccagctatttgggagactgagacaggagaatcacttgaactgggaggtggagcctgcagtaagccaagatcgcaccattgcactccagcctggttaacaaaagcaaaactctgtctcaaaaaaagaaaaaaagagaaagggtggaaaagagggattccagagtgccaggcacacagattttctggaaggtttacatgaggactgctgtggtttgaatgtgttccccaaagttcatgtgttggaaactcaacccctaatgcaacagtgttgatcagtggaacctttaagaggtgattaggtcatgaaggctctgccctcatgaatggatgaaggtagggtgggttagttatcttgggagggggttcctgataaaaggatgaggttggcttcctccctttctgtctttccccttctccctctcacatgtggtcactctcttgcccttttaccttccagcataggacaacacagcgagaccttcaccagatgcaggcccctcactttcccagtgttcagaaccataaaccaagtgaacccttataaatcacccagtctgtggtattctgttatagcaacacaaacagactaagacagggacactcagtgagctcttctctctacttgatggagcactccctgcgtggtgccttgtatttgtagacatgatgctgtaaatgctctttgagtgtctcgaaggcttttatgtttgaggagtttacagagaagcccgtacagggttcaggtccattctgttgcttctttgctccttagttcctcccctaatctgatgttaaattagatcatagtgtggtccttggaccaatagtatcagtagcacctgaaaatcatgctggaaatacagattcacaggctgctccccagaatactgaagaagaaactctaggagtgagacccaacaatctgtgtttaacaagtccccaggtgagtctgatgcacaaagaaacgtgagctgctgtattagatggtgttgagttcatgccaccgaatcactgacacacacatctgctcactgcttgctcttcgcacaggcccctggatcctcctggaatccctgatccctgttgctcccttgcggagttttctagtccctcttatttgaagcatgtctttcagagcctcgcaccacccagcttgggtatctggtgaattctgtggtctgcatgtccatgtttttgacattctgggaagggtggcccaggctgtgatttgccatctactgctgcaggctatggatggtattcagaagggaggggagatgctgtgtgcgtgttctgaagggtttcccactaaatggagagactgactctctccataagtatttgatttttactttatctcctcgttgacttcacagtgtaagtgcagtttgtctctactgggtgatgcatgcagataaatgtttatgtgaacataagaagtctgcatgtgtgggtgaactctccacatcatgtcatttattgtccatcattacgtatctgtggtgtctagcacattcctctaccttattttctgtcattgtacctacttctacctgaacacgtattaaatatcttattaaaaatacacaaatattatgtttcctcagtggttttttccccctcacattgggccctcctcttcagtggactacagtgtggtacctgcaggtctcaggccttctgggaggttccagcttttcctggatgctctctctctctggccagctcaggctggagcagtgggtgttggtgccatcctgtggctataggtgataaaccaggttgtgttttgacccctagtcttgaatcctggagttctcacatgcgtggatttaaatgctgtgtctttctaagggcagattgtgcccattttccttctctgcctctcaagggactgtttgctgtgtttattgacttaccattaaaaaaaatcatatacattgatgaattagattgtactccataaattatatatgtttgaaaaataaagaatattttttcaatttttttctgatttttacctatcttttaaattgtatatatttatggggtacaaaatgatgttatgatttttccatacagtgtggaatgtttaagtcaaattatcctatccattacctcaaatacttgactttttttggtgatgagaatggtgtttatcactttcactcatcagctcctgatgtcttccatgctagggacaggaaaggctcaacacttgactttccctcctgttttcttagccactgtcaacccttgaatgtaccctccagggttgcctgtcaccttttacacctagcctgatccttgtgcacccactttcctctcagggactgtccttagggagtgactttatgcacagacttaatgtgctcttcctgcctccttcatccccataagcccccatctcagccccatctgattatttcctccctctctcatttcctgttattctgttggttttctaacctgaagggtaactgcttactccttagttttctgccttaatttctaagtcataggctactttcaggctaaaagttttcctccagccatggttttagtctcattctgtaagtcttggtttttagttttattcatttaaaattaatctttaataacttttttgactcattggtgacagagtaattccctctcttcccaccacaccaccctctgtccccaagattctggaagtttgttcttccccttttgtgatcattgttacttaaaactttgagtttttcaaattagaagtttcttctataaatgtatatagagcttggctgggcgtggtggctcacgcctgtaatcccagcgtttgggaggctgaggcgggtggatcacgaggtcaggagatcgagaccatcctggctaacatggtgaaacccgatctctactaaaaatacaaaaaaattagccaggcgaggtggcaggcgcctgtagtcccagctactcgggaggctgagacaggagaatggcgtgaacctgggaggcggagcttgcagtgagccgagatggcaccactgcactccagcctgggcgacagagtgagactctgtctcaaaaaaaaaaaaaaaaaaaagtgtatagagctaataactccttgctttttttttttttttttttgagagtctcgctcttgttgccaaggctggagtgcaatggcacaatcttggctcactgcaacttctgcctcctgggttcaagtgattctcctgcctcaccctcccaagtagctggattacaggcagtggccaccacgcccatgtggggaaaagcaagagagatcagattgttactgtgtctgtgtagaaagaagtagacataggagactccattttgttatgtactaagaaaaattcttctgccttgagattctgttaatctataaccttacccccaaccccgtgctctctgaaacatgtgctgtgtcaactcagagttaaatggattaagggcggtgcaagatgtgctttgttaaacagatgcttgaaggcagcatgctccttaagagtcatcaccactccctaatctcaagtacccagggacacaaaaactgcagaaggccgcagggacctctgcctaggaaagccaggtattgtccaaggtttctccccatgtgatagtctgaaagatggcctcgtgggaagggaaagacctgaccgtcccccagcccgacacccccagcccgacacccgtaaagggtctgtgctgaggaggattagtaaaagaggaaggaatgcctcttgcagttgagacaagaggaaggcatctgtctcctgcccgtccctgggcaatggaatgtctcggtataaaacccgattgtatgctccatctactgagatagggaaaaaccgccttagggctggaggtgggacctgcgggcagcaatactgctttgtaaagcattgagatgtttatgtgtatgcatatctaaaagcacagcacttaatcctttacattgtctatgatgcaaagacctttgttcacgtgtttgtctgctgaccctctccccacaattgtcttgtgaccctgacacatccgcctcttcgagaaacacccacagatgatcaataaatactaagggaactcagaggctggcgggatcctccatatgctgaacgctggttccccgggtccccttatttctttctctatactttgtctctgtgtctttttcttttccaaatctctcgtcccaccttacgagaaacacccacaggtgtgtaggggcaacccacccctacacgcccagctaatttttgtatttttaatagagatggggtttcgcaatgttggccaggctggtctcgaactcccgacctcaggtgatctgcccaccttggcctcccaaagtgctgggattacaggcgtgagccaccatgcctggccaacttcttgctctttttgccactacttttaagctgatatatttggaactgaggtagcctcattctacaggtttagatctgaagtattttaactattgcttcttccagtgtattttctggtttgcaggccagtttcttctttaactcatcagtgacacagtggtttgtatggcttttaatttcaaagaatattttttcaatttgcttttttgttttttgctgatttttatctatgctaattttaactagacatgttcccttgatgggcatgactagattttttcttccccactgcgtttataatttagatggattttcacatctcaagccagttaagagtgtggaaaataggactccttaaagcacagataatgacaagtggttcagatttacaagggtaactcaggtgagagtgtatcattgtacttggcacacagcactgagtaactatcacctttcatttaaatgaatgcagctgtaaatgctttcctagatgtcttgttgatgtttgttaatttctgtagagtttcattctgcccctttcactgtttatcacttgatccttatcacttgagagtccccttattacttgacctgctgttacattatgtttgatttattacaaataccccatcagcctgggtctctctttactccctttgtacacctacatctaaacatagtgatttggattatctcaggatcccacatcctcactgtacccccacccccacccctaccatatctttcttaagttttctagtccctgcttttcatttgtgcttcttaaatcccagccccatgcctgactgtggttcccactgagttctgtgacaagcattctacatttatagatattaaatctttggccgggtcatttacctgggctggaatagggctctcggctgatcctccttcctaaacaccctctcaatgggagaggctgatacccaacatgcaaaccttgttttttacttctccaggcaaagggatgttggaagacattctggagggggtagggtgtgaagatttacaaataatctttgaatatctgcttcatgataggtcttggaggtgccttgtgggtgtggctttggagggatggttacgaggaaattgtggatattaaggaagtcaggaaaggaaaagatgactcactgacaattcaacaattgtcctaagggactttctggctgcttgatgccctagaagccaggccctcacttctgtaaatgctggggactgtggatacagaatttaaagggtcaccaaaaaaactcagtaatcaagataaacaatattttaatgtaatatctttaaaaataaaatcaatgcaaaaagaaaacacccctgttgaacaaaacggtcagacttatgcctcctttccaacaccgccccacctccaccccaccctccggaagtttcctccaagccgcacctgtaccccagcctccaataaaaacctcgggaatttcctgatcaagcttcggatccccaccaccaccaggggatcttttgctgttcaccccaagttcagtctgcatcccctaaaatcctagggacacgcgaccagtctcccccatctgcattccgggagtttgccccaaaccaatcctgctctccgcgaaaatagccttggggttccctgtcctggtacaccctcctactctaggggacaaagggccggtgtcgcctccaaactggtggttcccgcagagcatcgtctctccctgagccgcgtctgtcccgacctggcacctgctcagggaagggcgcatcagggcggagacttgcgtagtgagctcagctcacccgcaccttgaaggtcagcgcacactggccacccgcagagcaccgggaccacattttgcagaatccttcggcagtcccgcgatgccttcgcggtcagcagatctcattggtttacagagaaacttgtcaacgtcacttgggcatcttaagagtgggttcgtaaacttggttgtgtgcgctgtgcagatgtcagtcaccctgtgtggtgggcaaagccgacttctccgcctctgtagctccgaaactacaatccccagaggcctctgcggtcacttccgctcccctccctacccttcagtgtgtagcgttgacgtcagaaacacttccggtcggtggcccaggcgcgttaagctggttgggacccgggaaggcctccctcttaaggtctttcccacacctctgcaccttgttacctgactttcggcttcaggatccgcagcgtgcacccgcgttccgtgagtgccctataggcagtcagcatgcccctctgcgtgtccctgtgttacggggacgccggctgggagccgcagagctatctcagaactagggcgctctcctttgggcacctccaggccattttcctttcattcgagcccacagggttagagataaaccctcactccgttgcttggggacaagggcttcactccctgtcccgagcttgcggctgagcttgagggtggctgggtcatcctggccccccactggatgggaattggctgctctggtgatttctgtgacatcccagaccccaactgtggggctctggagcggactgcgcttcacttcgtggggagggtgtttccacctaggccactcttatttctcttcacatccccagatctgtcttctgagactttgcccttctccaggaagagcactcaggagaccaggaaaatggccacagggctcctgagagccaaaaaagaggtgagaattaactgtaattctatcttggctgtcaacagaatgggtcccattaccttttcttgtcctggaggctgccttgttggtattgggcaaagtcattcctagccctagtcattcctagtccatagaacaaggaggattttgatatagtcttgtagagcgtccgattctgtcgctgttcagggcgccacttgtaacctgcacggacctggtggactgaacaaaaggaataaaagacaagaaacaaaaaagtatatttggaagaaggggtcgggggcactttgtctctagtggacaagggccctgagctttacacaaccctcccgtatttattggtaaaacagataacaagttagggggtggtgattgtcaggtaattgtcagttggccgtttggttcgcaattgcaagactgcatccttccaacaataggcgctagatttcctggtagatcacttcaaggagccaggcgccaggcagtgatggctctcagcacatcttttggtggcagtgtgcgtttgctcacatcctgcattcatgataaacagtttaccgtttaatcatataacctccagtggaatgctgagttggtcacaatccctttggtcttttcggctccaaacatagtctgacctgaattttacctttgagttcattcctagtcctggaagagtgcctcgttctaacaggagtcttccctcagcattcctttctgctccatccttaccgcagtcactcatgaagtagttaattgtgaacaacacatatggagcagtttaaataaaagtaaagagacatacatgcgtaattgttcagtgatgtggatgaagggcagggacagcacagatgcctgtgatttcaaatggttagggaggcctcctagaagtagggctgtctcaattgcccctgactggtttgttaagttggagattggggggaaggcattccagtgggaggcggcaaggaagcatagatagtttcagaggctggactctcagtgtggaaggattatggtggccagtggacttgcttaagattgaattttttttttttttttttttgagaccgagtctcactctgtcatccaggctggagtgcagtggcgccatctcggctcgctgcagactctgcctcccaggttcacaccattcttctgcctcagcctcctgagtagctgggactacaggcgcttgccaccatgccaggctaattttttgtatttttagtagagacggggtttcaccgtgtcagccaggatggtctcgatctcctgacctcatgatccacccacctcggcctcccaaagtgctgggattacaagtgagattacaccacacccggctacctatgcatatttaaaaatcaaccttggccaggcgtggtggctcaggcctgtaatcccagcactgtgggaggctgaggcaggcgaatcacgaggtcaggagatggagaccatcctggctgacacggtgaaaccctgtctctactaaaaatacaagaaattagctgggcatggtggcaagcgcctgtagtcccagctactcgggaggctgaggcaggagaatcgcttgaacctgggaagcgggggttgcagtgagctgagatcgcaccactgcactccagcccgggcaacagagtgagactccatctcaaaataaataaataaataaatatacatatgttaagatacagactatctattcacacatagaacaaggagaatttcgatatagtctgacctgaattttacatttgagagcactttcagcttctggcaattgggacatttccaaaattccagattccctgcttctctgaaaataaatctgccctaaatctgcactgttctttggtgtcagacaatttgagctgaacaacgtctttatcatttggacgtgaccttcagagtatcagctgcactttctgcagtgtcctttatactgaggttgaaaccattgactacctaacatttcacccccctctcatttttattacctacctgacccctgaagggtttgccttttccacctctcggtcagggtggggacaaatcagaaaatgctgagtgccaggctgagcagggtagactttgtctttgagtaagctgagttttgaaggatgttaagaagggacttgacataaggaagtcaatggtatgtgggaaatagtgattgactgtgtataaggacttaaggggaagcgttcttcttttttttgaaacggattctcggtctgtcttccgggctggtgcgatctcagctcactgcaccctctgcctcccaggttcaaacgattctcctgtcccagcctcccgagtagctgggattacaggtggcgccaccaggcccagctaatcttttgtatctttagtagagacgggatttcaccatgtttgccaggctggtcttgaactcctgacctggtggtccgcctgcctcggcctcctaaagtgctgggattacaggtgtgagccacagcccccggccgaggggaagcttttctaagccctgagattggtgacgatgatgcccctgacttaattgaatgcaattaacattcattaagcaccaacacagttgccaggctgtttaacagtcatttttgatatgggttaacttggttatttcagatttgccttgactatccttatcaagaaatctgagtggaatttagacaggaaaagagatttcttaattctggactccagtggtggggattatgcattcctggatgttatcagagcaacactgagaattctgtttctcatttctaaaatagttaattcatttgagagtgttaataccaggaatacataagaaatccaattcaggacatttcccaaggtaacattgaatattttttgtgcgtactttctcttttctttgaggcggagtcatgctctgtcacccaggctgcagtgcagtggcacgatcttggcttactgcagtctccgcctcctgggttcaagcgattctcctgcctcagcctcccgagtagctgggattacaggtgcatgccaccacgcccggctaatttttatgtttttagtagagatggggtttcgccatgttggccaggctggtttcaaactcctgacctcaggtgttccacccacctctgcctcccaaagtgctgggattacaggtgtgagccactgcacccagcctttttgtgtgtactttcttcaccactcccagtgttaccagggaagcattctttctgattggctgggaaaagtcagaagtttgtggtagctgacttttcctgtgccacctccttcattctcagtaggtctacccggaactgcctcctgtatataaacaacttgttcttcaatgtagctttttaacatagtatttactcaggaaaaattaaagggcatgagcatttaaatagttgtttaagatgaaacctctgtgtctctcatgcctagcacacatgaaatgtttggtgcatgaaggaatcacaaccttaagtaaacgatttgaaggaactaagtaacaaaggagtttctgttgtttgctttggtttgttattttgggcatgtggttaatcacatgtttcaggagcgttgggtagaatttccagatactcttgatatgcatggcatctgaattatacaaaataatcaaagcaagactatcttaggacattaggtattactgccaaggacctttgcctgagaggataaattaaaatttgtgttaaatttgtaacaatgagatgaactggcaggcacattatgttattttttttcttagcatttttccttttccttggtgccatacaacaaacttgagtgtctgctatgtgcagaacactcagtagattacagttaatgatgggtaaaacacagtctgcacactcaggagtcttccattttattttaggattcctttctcatttggatttaatttaattttatatgcgctcacacccctgcaaacatattttgacaggccctaatggtaaaatcataatggagtaaagttactggcagtgtatctacccagctctatttttaaaggtgtagaaacagccaacacttatcccactgaaaataatttccatagtaatccattgaatggatgaactcatccattgtttcccaatttttggactcctgtttccaatgtttaactgttgcaaataatacttctatgatcagctttgtacatgaaattcttatataggtttttattctcatacaaaatatgacaaggtgaatagacatgactgttttgaagcattgggcacccacagcagttggagatttgaaccctgccagttttttttttttttttttttgagacagagtctcgctctgtcactctgtcccactgcatcaggctgggatgcagtggtgcaatcgatctcgcctcactgcaacctctgcctcccaggttcgagcaattctcttgcctcagcctcttgagtagctgggattacaggtgcccgccaccacaccaggctaatttttgtatttttagtagagacagggtttcaccatattggccaggctggtctcaaactcctgacctcaagtgacccacctgccttggcctcccaaagtgctggaattacaggcatgagcaccgcggctggccctgaaccctgccagttctaaagaatttgaacttccaattacttctttcttttctgagactcccttcttcaccatgtgtttctttatactgtgcaatttttattttattttattcatttattattattattatttttgagatggagtttcattcttgttgcccaggctggagtgcaatggcatgatctcagctcactgcaacctccgcctcccaggttcaagtgattctcctgcctcagcctcccaagtagctggaattacaggcatgtgccaccgtgcccagttcattttgtatttttagtagagatggggtttcaccatgttggtcagattggtcttgaactcctgacctctggtgaactacccgcctcggcctcccaaagtgctgggattacaggtgtgagccaccacgcccagccctactgtacaacttttatttgcttttattttaattattacactgtgcagattttgattaccggggtagacctgccaacttaggtctctttcttctctcacatgaaagctcacatagtatcctgatttgtttccaaatgttgacatggtcctttgccacccactacatgtttctgtaatcctcgttttccccaacattgcagtaacatcacttttcagaaacctttagtgcctcatttcagtgtcttagatatttaggacagtcttcatttcaaatattgtatcctgttgtctgatgtcatgttctgattattcagtctgaaagtgtgtttattgttaccacaggggagtcatcttatgtgtacttttttttttttttttttttttgagacggagtctggccctgtcgcccaggctggagtgcagtgtcacgatctcagctcactgcaagctccgcctcctgggttcacgccattctcctgcctcagcctcccgagtagctgggactacaggtgccgaccaccacgcccggctaattttttgtattgttagtagagacggggtgtcaccttgtcagccaggatggtctcgatctcctgacctcatgatctatccacctcggcctcccaaagtcctgggattacaggcgtgagccaccgcgtctggccttgtgtacttttaacttagatacatttactttttatccactcagctgaaaaaagaggagaaaaataaaagtaggtcaggtcaatctgtttcctttcccatttaatgaattcatgcccaggagtgagtgagaaatgggaggactgaatctgctgttctccaagactagcttaggagtttctgacatcatgggcatcccagcaagccaacggtcacattagtcaccacgtatttttcatatcacgtgatccctctatcagtgtatcagcctttgctgtataatgaacaatcctaaacatcaatggcttaaaacaaaatcacttattagcacataatttggtaggttcatattttgggctggccgcaggtaggttttgcagatttcacctggtcttgtcattttgctgcagtcggctggcattttgaccagggctggaggactatccatgtgtgacaggaagctggttggctggggtgcctagtttcttcttggttctcttccatgtgggcttgggcttggtcaaatggtcttgggtttctctatgcaggaagagaggacagccccaattaacaagtagttttaacgttttggcttttgtcatgttcactgatgtccttttggccaaaggaagtcacatggccaagtccagagtcgtcatagaacgggataacataagggagtagatacagggagacatgatttattggtcccaatgattcatacccttaccatgtgcaagattaactcacccccctcccaagatccccaaaagtttcatcttgattcaaaagtccagtatcttatgtgtaacagtctggatgtagctaaagcttcttcactggatcctttttgagtcagatacctgtatactaaaaaggcaagtcatttgtttccctccaccccaaacattccctacctaacatacagtggtgagagagagatactgcagtagatgctcccattcagaaaggacaggaattaagcatagaggaggcctctccattttgaactgtttcagatcctttggacttccttgaaagctctatgggtttcccatgtaccagatttgggactgctctattaaacaaaagctgaaatcacagtcagacaggcctcacatctttggcaaggtgtcggtgctatgggacaatgcccataagaatctcagaagcctttttgtccagcgtggagactccactaggcatccccttaacacttcagaggttctaaagtttgggtcttttagccaaacttttgattcgaactttactctgagtttatttttttattttgagacatgtgctggctggagagactgaagatgtaaaataattttatttccaagctagcaagtcctgacttgtctatatttcctctgaattacgcttgcaagctgtataattgcttcttcagctcttctgtttctggacattattatatgtcactagaaacatccaactgaattttttttttttttttttttgagatgaagtttcactcttgttgcccaggctggagtgcaatggagcgatatcggctcactgcaacctccacctcccaggttcaagcaattctcctgcctcagcctcccgagtagctgggattacaggcatgcgccaccacacctgggtaattttgtatttttagtagagacggggtttctccatgttggtcaggctggtctcaaactcccaaccttgggtgatgcgcctgcctcggcctcccaaagtgttgggattacaaatgtgagccaccacgcctggcccaagtgaaacttttaacaggctttttggagatctctttagctagatccaaaaattcatcaggtatattttctgttttccaagttcatgcaggcaatagctttgctaatatataatactagttgccttgttcaagctgccatatcagtttcatcactcctttcccagtccccactagcagtttgtttactggttttccagcctgtgctaatagttttcctggatgctttccaagcctctgcccatgtcctgctcccaaagctaatgccacatgttttaggtattttgttatggcagcacttcacttctgtgtaccaacttagtggcctaaagaacatagcggcttaggcctggtacagtggctctcacctgtaatcccaacactttgggaggccgaggcgggcggatcatgaggtcaggagttcgagaccagcctggccaacatagtgaaaccccgtctctactaaaaatacaaaaattagccgggtgtggtggtacacacctgtagtcccagctacttgggaggctgaggcgggagcaggagaatcgcttgaacccaggaggcagaggttgcagtgagccgagaccacgtcattgcactccagcctaggtgtcagagtgagactatctccaaaaaataaagaataaataaaataaaaccaaaaaaaaaaaaaaaccaaacaaacttagcagcttaaaatgaaatcattttttcaaaatcctgtgggtcagcaagtaggcccggcatggctgagctgatcctcttggcatcctcatgtggctgtagttagctggctgctcagctacagctggatggtctcaacctgtctggtggttgacagcttggttggctgggatgcttcaattcctggttcttctccatgtggcctcttcagcaggcaagctcaggttattcacatggtggtctcaaggtttcttgcacagcgagaaggccagccctgaactcagatgcctctcaaacatctgcttgcatcatgtttgctggtgtcccactggataaagcaggtcccatggccaagcccagggttaatttaggaggagactgcatgaagggtagaaacagggaggcatgattcactggggccatcactgtacccatccactggttagatacaatgcttttggccgcaagcaacagtaaacctaatttaggctgttctaaacaataagtaacttagcctatataaaaagaagttcacagagagagtgcactttggggttggtccttcagctccataagcttcccaaggactggggtgctttcatctctgcagtctaccctgttctctacagtgtcagcctcatccaggctggttcccctcaaagccataggatgtctgccaatagcaactttgtttaattctcacaatggccccataaggtaagtactattataatatcgattttataggaaattgagacacagatattaagatatcaacgcaaagtcataggggagggaggagagaggggactgtaatttgaacacagtttgtctccagagtttgtgcttttagccactgagtagttgttaaactttagtgtgcatcagaattacttggaagccttgttcaaacattgctgggctccccccgcaatttctgattcagtagccctaggatggggactgagaatttttatttctaacaagttcccaggggatgctggtgctgcaggttcagggaacacacattgagccagtgcactaagccctgctgcctcttttgggtaatctgtgcccatgtttctgagcatcaggaaaagtgcttaattcctgtgactccatcttacaaatgacgaagtcttttgctagaatcctacggtaaggcttcttgtggcctgttggttaccattcatttttcatatatttatttttcagctggcaagcagatgaattaactcccccaagcttctagctgtgtttctactcagtgggagagatttggagtgaatcatgagggtcaaccacacagtgtctacaatgctccctacatgcatggttcacagacaaaccatgagttgttccggggctggaggaataacggttgtattaaatgtgttaaagtaacactaattgctctgtgatgtagctccttcgtgggagattttcaaggggtgtatgtgtgtatgttctgagaaggggttgtaaaagcaaatcacaacagggactaggcagatacctgaatagcctttttctctccagtgtttaatgatgaacagtttcagacatatggaaaaaaccaggaagccttgtacattgaacactcacatacccatcacctagattctcagtgagtacctccttctcatgaacttttcctgatcctcaatcctacagtgacctctccctcttgagattactctgacccagtgattcacaaccatcacactacttttaggagcctttgaaagtacaaaagccccatcccctggttttacggatttgtggtgggactcaagaatccataatttaaaacaccacccaggtagctctaaaatatagccagagagagatgaggtatgagaaccaaagccctcactcatctgtgctcttctcttgcgattaagtacattgggactggctgggtttggggacagctatcgatataactgagtgtaggtagagtcttaaggccatttcatagtccagccagtgtagaatagtggagctggtaggggacaggaaatgtagggaggattccctgggaagggtacagtgtggaattagttttagagacacaatgtcataccctcaaggagtgatggaggcattctgagaaggggatgcaaaatcaaagagacaaggcatgtacctaaatgaatgacgctggtgaggcagtctccaatagtgtgttgcggctgatagacccccagcatgagtcaccgtcagccaactgtggtcctacagcagtgcaaagcccagggtggtcagatttatggatttttaacataacccatagattgagattttcatatgaaatcttccaacatttaattgatataaacacaagttttaaagcagtatatgggtcaaattaaacccctctatggactgcagattgtacctaaagagaataagtgttgggcagggaagaatcccagtgctagatttccagactcatttggaaatctcaccgaacttccatgccaaggacggttatatattcccatcctccaaagtacagctttctaggtagcagaggttcgtttgaaactttgttgcttgtctaataataataaatcatttttggttatttaaaaatatttgactgctaagtgtttgcagattctgttgtagacaccagggcaatcacagtgatccagccatgcacatggaactgatgtcttagtgggaagtcagaaaatagaaatgaatataatgtattatcttagagttaaggcaacacaataaagcaggagaggggaatgaaacccgcatgagagcatggaattttacatagaacggccagggactgcactgggcattttgtctgagcccttcacagtaatcctaatcctcaccacaagctgtgagataagcactgttatttttagttcgcaggagaaactgacgtgctgagcagctaattcagtgcctgaggttacactagttgtggacagagatgggttccaaatccagatagtatgggttgaatccacgctcttcatcaccacccactttccctccttaggcctgagcaggcacgtggcagcatttggtagaggaaggagtgagccctgctgtaggaactatatatattggtgagttatttgcccccaagccccagaggcaccactgcttcaagtagaacaaatagtgagaccaagtagtctcagaaaattttcaaactcagcaagataattctttactatttagttgtacttgtgtggtgtcttcttctccctgcctagttttgaaacgccctctaggtaagggctttggttttgtttgctcttatcctccctagcagctagcctgggatattgacagtaagtaacaggtgcataaatgatgctggctcggcagagataggagaataatggtctttcactccttggtgccaaggtcacaatccaaagtagggtctagaaatctttcctacttccctcagggaagccttttgacctctcattctttttttttttttttgagacagagttttgctcttgttgcccaggctggagtgcaatggcgcaatctcggcttaccgcaagtaactgggattacaggcatgcgccaccacacctgactaattttgtatttttagtagagacggggtttctccatattggtcaggctgatctcaaactctcgacctcaggtgatccgcccaccttggcctcccaaagtgctgggattacaggcatgaaccaccgggcctggccttgacctctcattctaaagtgtgggagggaaagacaggctcctgggtgagcagaggtgtgttttgtgttaaaggcgttcgtggcattcagggatgtggctgtgtacttcacccaggaggagtggaggttgttgagccctgctcagaggaccctgcacagggaggtgatgctggagacttataaccatctggtctcactgggtaagaatggcctcccttggcacttaaaatctgccctacagagtattttccactcatcgtgaggaagggctacctgcagagcacctttcccttagagttgagcttgaaaacaatttacttttttcctctgggtaaatctggatttagtagaattgaaagcagacagattgatttattcatgttatggatgacactacatttccaggcctgtttcccaaggcttgtgctctctctttattttgcttcaaacccaggaaatttttcatacaccaagtgttcataatatgccatctttctgactggagtcacctttccttagtcaacccttctacttcagagagagaactattcataggtcttttttatcctctgggtttcctcacccatttcagctctgagttctagaatgccctcttgagcccataaccaacaatgtcctcattttcttccctatgaacagaaattccatcttctaaaccaaaactcattgctcagctggagcgaggggaagcgccctggagagaggagagaaaatgtccactggacctctgtccaggtgagtgttgagtgtggggtagacgggataatccacagcttggcagataggaaggaggaggcatctctcagatactgggaagaagctcttcttcaggcctcctaagccaagagaaacgttgcctgacatggtcttctttccggaacataatcttcagttgagggagggacttccctggttcccttgtctcttccctacaccaggaagcctcccttcctcatttgtcttctccgtaatgcttagtctttcctcattcactgtcttctttctcacctgatcttaaaaattgcatctacccatgaatgttaagtctacgacacttctagatactttctagctactcttatgctaagattaattgattaactccacctctccaattcccataacttattacacaatacttaagctatgactaataataaaatacatactcatgtgccaatgtcccagcttaagaaataaaaaatgacctaaacagtcgaaacccctatttccccttccctgatggtatcctctacccatccctccaatggaattgtttttcagtattagggatttgtaattctcatgcatggctttatcatttccttcatatgtatgaatcgctaaatcatctatattgttgtttggcatattttaaaactttatatcaatgtcatcatattatgtatgtattttgttttcttccctgagactaattttgtactatgttggtatatgtagctctgcttcattcatttttgtggctatataatattgtattttatgcataattataatacaattcatttatccattccatttttgttggacagttacagttctaacagtgtattcttttgacccactaaagaatgttgctgtgaaccttctcatagatatgtccttgggcacataagcacccgtttatctaggatatgtacctaggaataggacagctgagtaaaagaatatgcacctggtcagtctgacaaggtaatgccaaactattctccaaagttgttgtattagtgttctagggctgccacaacaaagtaccacaaactgagtggcttaaacaacagaagtttattttctcacagttctggaggctagaagtagagatgaaggtgttggtagggttggttccttttgagggttgtgaggaagaatctgtcccatgcctctcctctagcttctggaggtttgctggcaatccatggcgtggaggagcagagtcccagtctctgccttcatcttcatatagcattctccctgtgtgtgtgtctctgtgtccaaattttccttgtttgtaaggacattattcatactggattaggacccactctaatgacctcatcttaactaattacatctgcaacaaccctgtttccaaataagttcatcttttgagatattaggggtttggactccaatatgtcattttttggggaaacagaactcaacctatagcaattgcttacactcacatagcattttattgtttgaggattctagttgccctacatccttcctaatactttgtgtggtcagactttaggttttgatcatcttttgggtatgaaatggcctctcatagtagttgtaatttgattagttttgagtttgagcatctttttatatgttcattccttgactggccttggtgtttgctcttctgtgaagccttttcaattcttttgcttttcttcttgttgatttgaatttgaatttttaaaaataaatcattgaggtgaactctttatcagatgttccaatctgtggcctacctccttgctttttttatttttttttattgagatggagtcttgctctgtcacccagccaggagtgcagtggcatgatctcagctcacagcaacctctgcctcccaggttcaagcgatcctgctgtctcagcctcctgaatagcggggactacaggcgtgtgccaccatgcctggctggtttttgtatttttagtagagacggggtttcaccatgttggccaggctggtcttgaactgctgacctgaagtgatccacctgccttggtctcccaaaatgctgggattacagacgtgagccaccacgcccggcccccactggcctttttttttttttttttttaatacagagtctcgctttgttgccaggctggagtgcaaaggcgcaatctcggctcactgcaacctccgcctatcaggttcaaggattacagacgtgagccaccacgcccggcccccactggccttttttttttttttttttttttttaatacagagtctcgctctgttgccaggctggagtgcaaaggcgcaatctcggctcactgcaacctccgcctatcaggttcaagcaattctcctgcctcagcctcccgagtagctgggactacatgcatgccaccacgcccggctaacttttttgtatttttagtgttagccaggatggtctccatctcctgacctcatgatccgcccacctcagcctcccaaagtgctgggattacaggcgtgagccactttacctgatgccctgcttgctatttaaacaaactgtgaaataatttgtctcaatttataaaaataatacagagagtttccatttactcttcaccctgctttccccaatgataatatcttatataaccacagtacatttcaaaaccaggtaactgacattggtacagtactattgagtaaactaaagactttattcagattcagatttcatcagtttttgcatgtactcttttttttaattgttgctctatagtagtatgaaatttcattacataaataagatttatgtagccaccatcaccacaataaagatgtagaactcttctatcactacaaagaaaactctcctgtgctatcttccctccaatcttaacccctggcaactactgatctgttccccatcactataattctttttgcttttttttttttttttttttttgagacagaattttgttcttgtcccccaggctggagtgcagtggtgcaatcccagctcactgcaacctcggcctactggactcaagcgattctcctgcctcagcctcctgagtagctgggactacaggcatgtgccaccatgcctggctaattttgtatttttagtagagacggggtttcaccatgttggccaacctagtctcgaactcctgacctcaggtgatccacccacctcggcctcccaaagtgctgggattacaggcgtgaaccacttgtgcccagcctcaaattttatttctactaaaatatataattattcttatgctacatttcttcatgtgtcagtctttttaaatttgtgtattttaattaatttgtccacttaacctcagcagttaaatttgttggcataatgttcataatattcccaaatttctttaaaagtgtgtatatttctctagtggtgcttcctctttcattccccatattgtgatttaaaacattttgggggtattttatctaaaggtttattaattttatggatttttgcaaagagtcaacttttggtttcattgattttctgtagtattaatctatatcccatttaagtgatttttatttgtatctttttctgcattctactttctttgggtttaatttcctcttcttcttacttcctgaggtagaagcttaggtcattggtatagaccttcttttctaatacaatcacatatatatctgtacatttatttctaagccttgctttagctgaatcctacaacttttggtgtgttgtgttttctttatcatttagttcatgatattttctaattttcttattttttaacctattggttgtttagaagtgagctgcttaatttccagatattcaggtattttctaaatgttttatttttattggttttcaatttaattgtattttgttgagagaatgtattctgtatattttcaatctttcaaagtctgttgagattaattttatggcacagcatatgatctatttttgtgaacatcctatgagctcttaaaaggaatgtgtattctgcagttgttgagggtactatcctataaatgtcagataggtcatattggtaatatttttcagatgattgatatccttactgagtttttgatcttatttttctatccattactgcaaaggtgtgttaacatatcattgtggatttgtctatgtctctgtagtgatctctaaggttttgattcatacagttagtaattttgctatgaggcacatgtacattaataattgttacgtcttcttattgacctttttatcattatggaatttcctcctttgttttttagcaataccgcttgtcttcaggtctgttatctgatattaatatagctactccaggcttttttttttttgagacagagttttgcttttgttgcccaggctggagtgcagtggcactttctcgggcgtggcttggagatgccacgaccaaacacctcttaaaggcctcctggcttcaagtgattctcctgcttcagcctcctgagtagctgggattacaggtgcccactaccacgcctggctaatttttttcctatttttagtagagacaggatttcaccatgttggccaggctggtctcgaactcctggcctcaggtgatccacctgcctctgcctcccaaagtgctgggattacagacgtgagccaccatgtctggcccattccagctttttaatatttactctttccgtggcatacctttgtccattctttatatttcaatctttttatttgcgtctttgtatttaaaatgagtctcttatagacagcatatagttgatttttttcttctttatccagtttgccaatctctacgttttgttggagtattgaatgcattagcactcaaatgttattgttgataagtaaggttatttctacttttgccagatttttctttgttttctccaatgtgtttttacttgctctgttttctttagcctacttttgttttaatgttttaataaaatactttttagattcttttttcttttttttttttttttttgagacatagtctcactctgtcaccgagactggagtgcagtggtgagatcttggctcagtcatcctctgcctcctgggttcaagggattctcctgcctcagcttcccgagtagctgggactaggggcgcacgctactacgcccagctaatttttgtattgtcagtagagatgggatttcaccatgttggccaggctggtctcgaactcctgacctcaagtgatctgcctgcctcagcctcccaaagtgttcagattacaggcgtgagccaccgcgcccggctcctttttcgatcttcatgttaatttctctcagctatctagctatgtatctgccttgtgtgtgttcatgacttttccagggcttacaatatgtatttttaacttaaaccaattagagttattatttgtttaaggtaatgtaagaatctcacaagagtatgtttacattcccctcatcttcagtgctgttgtcatatacattatttctgtaaacatcctaaacccaatactacagtgttaaaatttttaagccatcgtatagtaatacgtatttttaaagaaattaaggtaaatgtatgtagaaatatgtgtgtgtgctttatatctgtcacatttcttatgctcttcactccttaatgtagatacaagttgccatctgataccattttccttcatcctgaaagacttcctttaacatttagtacagttacctggcattggattttccattttaatctgaaaagattattttctctccagtttgcgaaaattaactggagatagaatcgctggttaacatatttttctctggcattgcagtgtcttctggctttcatagttttgtaatttttgttgagtaattattatattgttcttttatattttgatcttctctggctgtcttcaagattttctcgttatctttggccttcagcagtttgaccgtgatgtttctatgagccgttttctttgtgtttctactacttaagcattatgaagcttcttggctctctaagttttattttctattcactgtgagaagtacttggctattatttcaatatttttcctgtcccttttactctttcctctcattctaggactcccaatttacctgtatattggactgctggaaatgtgtttctgaagattcatattgtctcataagcttctgttcatttttcttcagtcttttttctcttttttgaggggtgggtggatatatgtaatttctattcttttattttcaaattcactaatctttcttctttttctgtttgctattaaacctgtctagtgaatttttaaatttcagttgtttttttctttccccctcccctcctctcccctcctctcccctcccctcccctcccctcccctcccctcccctcctcttgtttctgtgggttttaggagtgctctcaggcaagaaagccacaaacaaaattattacccctttctgttgcaattttttgagcataaactcttccccatcttctggctggttatgtatattttccagtgcctttgagtagttatttgttatattttatccagtcttattattttctgctgcagggttcttgtgaccatttcagtctgctggcattttcgttagtgggcttcctcatacttatttttgaattgatttttggaaattgcttcaaaattacagaatatttgcaaaaataaaaatagtagaataaatatatatggtgcagtgagttgtatgtggtttgtccccaccacaactcatggtgaaatttaattgccagtttaacggtattgaaaggtggtggggcctttaagaggtgtttggttgtggcatctctgccctctcgaatggcttatgcagactgggttagttcttttggactgggttggttctcgtgagatcaagttgttataaaacaaggcttcctctgatgtttggcctctttgcatgcacttgctttcccttcctctttctgctgtgatttgaagcagcatgagaccatcaccaaatgggctaccatccaacctccagaattgtgagccaaataaacttttttgtaaattacccagtctcaggtattctgttatagcaatacaaaacagattaagacatatggcatatatgttattatataaatggcatcataaaatgacctactattttacttagtttgctttatcatttattcatgtgctcttttgcatgcatacccttcctccttccttcccctttctcagtacatatgtatgtatgtgtatatgtatatgtatgttcatatgtgtttgttttgtttttgtctttgtttttgtttttgttttttgagacagagtctcgctctgtcacccaggctggagtgcagtggcacgatctcggctcactgcaacctccgcctcctgggttcaagcgattctcctgcctcagcctcccaagtagctgggattacaggtgcacgccaccatgcctggctaatttttgtgtttttagtagagacagggtttcaccatgttagtcaggctggtcttgaacacctgacctcatgatctgctcacctcggtctcccaaagtgctgggattacaggcgtgagccaccacccccggcctgtaagtgtttgtttctgtgaattttctaagaatgtcgatattgtctcatataaccacagtgtggttatcagcctcagtaaacttaactttgatacagtcattttgcctgttatctaccattcgtattataattttgtcaacatatagaataatatggttttttactttccagaacataatctagtccaaggttagttagttcattttcatgtcatgtctataattattattaagggaagggaattattatttcaataatctttctctgtcttttataacattgacatttcatttgtttatttaattttagattcagagtgtacatgtgcaggtttgttacatgggtatattatgtaatgctggggtttggggcttctattgaacctatcacccaaatagtttacatagtacctgataggtagtttttcagcccttacctccatcctttttcccctgttttggagtccccagtgtctattatttccatctttatgtccgtgtgtacccattgtttagctcctacttgtgagaacataggttatttgattttctgtttctgcattgattcacttaggatgatggcctctagctgcatccatgttgctgcagaggacatgatttcattcttttttatggctgcatagtatttcatggtgtgtgtgtaccacattttatttatccagtccactattgatgggcctatacgaagattccatgactttgctgttgggaatagtgctgcgataagcatacgagtgcaggtgtcttctggtagaacaatttattttcccagtcttgggattgttggattgaatggtagttctatttttagttccttgagaaatttccatactgtttgccatacaggttgaactaatttacatgaccaccaacaatatataagcattccctgttctgtgcatcctcactaacatctgtttttttgtttgtttgtttgtttgtttaactttttaataatagccattctgactggtgtgagatggcctatcttcttgtgggttttcttttcccatccttcactggtaccaagatctctttgtggttgtaatttgtatttctctgatgattagtgattttgagcattttttatgtttgctccctgtttgtgtaccttcttttgagaagtatctgtttatgtcctttgctcactttttaatgaggttatttgggtttttgttgttgatttgtttaagttccttatgtttctgcatattagtcctttgtaagatgcatggttcgcaaatgctttctcccattctgtaggttgtctttttactctgttgattgtttcttttgcagtgcagaagctcttttgcttaattaaatcatatttgtccatttttgtttttgttgcaatcgcttttgaggacttagtcataagttctttgccttggccaatgtccagagaagtttttcctagttttcctttaggaattttatagtttgaggtcttacatttaagtctttcatccatcttgagttgatttgtgtatatgagggggaagggtccagtttcattctcttgcatgtggctggacagttttcccagcatcatttattgaatagggtgtcctttccccattgtttatttctgtcagctttctcgtagatcagttggtagtaggtgtgtggttttatttctgggttctctgttctgttccgtagatctatatgtctatttttgtacttacaccgtgctgtttcagttaatatagccttgtagtatagtcaaagtcaggtaatgtgatatttccagctttgttctttttgtttaggattgctttggctagtcaggctttgttggtcccatatgaattttagaattgttttttctagttctgttagaatgttagaatgacaaatgatgttggtaatttgataggaattgcattgaatctgtagattgctttgggcagtatcatcattttaactatattgattcttaacaatctatgagcatagaatgtttttccctttgtgtcatctgtgatttctttcatcagtgttttgtagttctcctcgcagagacctttcacctctttggtttgatgtattcttaggcattttgtgtgtgtttgcattcgtgtggctattgtaaatgggatcttgttctttatttggctctaagcttgaatgttactggtgtatagaaatgctattgatttttgtacattgattttgtatcctggaactttactgaatttttttttttaatcaggtttaggagtcttttggagggacctttagagttttctaggtataggattattttctaggtataggattttctaggtaaaggattcttggcgaacagagataatttgactccctcttttcctatttggatgccttttatttctctgtcttgcatgattgctttctctaggacttccagtactaagttgaatacgagtggtgagagcagacatccttttcttgttccacttcttagggggaatggtttcagctttcgcccattcagtatgaagttggctgtaggtctgtcacagataactcttcttattttgaggtatgttcctttgatgcctagtttgttaaagatttttatcatgaaggggtgttggattttatccgatgctttttttacatctattaagatgatctttttttttttttttttttttttttgtttgagacggagtcttgctctgtcaccctggctggagtgcagtggcgcgatctcggctcactgcaagctccgtctcccaggttcacactattctcctgcctcagcctctctgagtagctggaactacaggcgcccaccaccaagcctggctatatttttgtatttttttagtagagatggggtttcaccgtggtctcaatctcctgacctcgtgatccgcccgcctcagcctcccaaagtgctaggattacaagcatgagccaccacacctggccggtttttgtttttaatcctgtttatgtgatgaatcacatttattgaacactgacattttagaatacaattcctcagttctcactttttttttttttcttttttgagatgaagtctcactctgttgcctaggctggagtgcagtggcgcgatctcggctcactgcaacctccacctcctggtttcaagcagttctctgcctcagcctcccgattagctgggactacaggtgcgtgccaccatgcctggctaagttttgtatttttagtagagacaggatttcaccatcttggccaggcttgtcttgaactcttgccctcaggtgatccacccaccttggcctcccaaagtgctgggattacaggcgtgagctaccgcgcctggccagttctcactttttaaaatagctttactgaggtataatttacatgccataaaattacttattgtatgtatacagttcaatatatatatattttttttttgagatggagtttcactgttgtagcccatgctggagtgcagtggcacaatctcggctcactgcaacctctgcctcctgggttcaagtgattctcctgcctcagcctcccgagtagctgggattacaggcatgtaccaccaggcctggctaattttgtatttttggtaaagacagggtttctccatgttggtcaggctggtctcaaacttccgacctcaggtgatccgccacctcagccttccaaagtgctgggattacaggcgtgaaccgccgcacctggcctgtgtgtgtacagttcaataatttttagtaaacttatagagttatatgattgtcacctctattcaacatttctgtcacaccagaaagttctcatgtgcccatttgcattcatccgtcctcccatcagaggaaaccattgatttgtttactgtctatagatttgctgtttctagacgtataagaatggcattgtgaaatatatagtcttttcttttttttttttttagatggagccttgctctgttgccaggctggaatacagtggtgttatatcggctcactgcaacctctgcctcctgggttcaagcaattcccctgcctcagcctcctgagtagctgggactacaggtgcacaccaccacacctggctaattttttgtattttagtagagacggggtttcaccatgttggccaggatggtctcaatctcctgaccttgtgatccacccgcctcagcctcccaaagtgctgggattacaggcatgagccaccatgcctggcccttttcattgtttattaaccatttgcatatcttttttagtaaaatgcctattcaattcttttctttattttaaaattagattgtgttcttattgaattgtaagaatttttagtatattctagacacaagtcctatatcaatataggattttcagatatttctccctgtctgtggcttatcttttcattttctcaatggtgtcatttcaggcacaaaagttttaaatgctgattaagtttaacttaccaatttttaaaatgggttgtgcttttggtgttgtaactaagaactttattcttaactcaaggttatgaagattttcttcactggtttcttctagaagttttacagttttagctcttacatttagagctacaatccattttagttaatttttatgtatcaaatgaggtgaaaatctaaattcattttcttgcatatgaatattcagttgtccttacaatctcatataaagagtatccttcctcccattgaattaccttggcacctttatcaaaaatcagctgactgtgaatctaagtgttcatttctagtctcctgattttgttccatgatctccatcttcctcctatgacagtagcacactatcttcattactgtagctttatattaagttttgaagttagaagtatacactccccaactttattttctttttcagaaattgttttgtctattttatgtcctttgaatttcaatgtaagttttaggatcagattgtgaatttccaaaagggaaaaaaaccaaaagcctgctgtggttgtgataccatgattatgttgaatctgcagataaattttggtgagaatcaccatcttaataatagtaagccttccaatctatgactgtctccctatttatttggagctttaacttcattcaacaatgtttgttaattttctttttaaaaatctttcttcttttcctcctttcctttccttttctctttctcttctctttctttcatcccactatgttgcccaaactggcctctaacttctggcctcaagcaatcctcccacctcagcctccttaagtgttgggattacaggcatgagccaccgtgcccagccttaattttcagtttacaaactttgtgctactttgtcacatttattccttagcattttattatttttatgctatcgtgaatagtattgttttctcagtttcatttttagaatagtcattgctagtatatagaaatataattattttttatatatttatcttatatgacctaagtacaattatgacttctagttgcttttttgaaattttatgcttacaaaattatataatctgtgaacaagagattttttttacttcttcctttctagttaagatgcctttcatttattttctcctcattttgtttgtcttctccttttttttttttttttttttgagacagagtctcactgtgtcaccaggctggagtgtggtggcacgatctcagctcactgcaacgtccgcctccggggttcaagcgattctcctgcctcagcctcccaagtagccgagactacatgtgtgtgctaccatagccagctaatttttctatttttagtggagacagggtttcgccatgttggccaggatggtctcaatctcttgacctcgtgatctgcccgcctcggcttcccaaagtgttgggactacaggcgtcataagtttttgagaacacgtgcaatatttgccacttcttctttcttcttctccttttccttctcctcctcctcctccttcttcttccttcctttctctttctcttttctgtgtctccctcttttgaattcaaccccttaaaaaggtaaaaaccatttttagctggcaggccatacagaaacaggtttcaggctggatttggcctgtcaggtgagtttgccaactcctgcaatagaaaatgtaatgcatagggctagacacagtggcttatgcctgtaatcccagcactttgggaggcttaggctgacctgaggtcaggagttcaagaccagcctggcaaacacggtaaaactctgtctctactaaaaatacaaaaattagctgggcgtagtcttggacgcctgtaatcccagctactcgggaggctaaggcaggagaatcgcttgaaccctggaggcggaggttgcagtgagctgagatcgcaccactgcactccagcttgggtgaaagaaagactccgtttaaaaaaaaaaacaaaaaaacaaaagaaagtgtaatgcatgaagtgaaatgaaaaatagatgctgggaaggatgtctaactgggagatagcttgtgatgtaaatatgtaaatatattatgaatgaccagtgggcaaggcaaaattgcctacacagccctacctatggcccctctgaaaatgttctttcttcagcagaatcgaagccagaaattcaacttagtccctcctgccctctgattttctccagtcagcaagctctcagccaacatgtgtggctgagtcatctctctcagctgttttcaagtttatgggcaggaaatcctctccacctgggaaaacactatccagaagatcagaaacaacagcaggatccattctgctttagtggcaaagcagaatggattcaagagggagaagactccagactcctgtttgggagagtaagcaaaaatggcacttcaaaggcactttccagcccacctgaagaacaacagccagcacagtccaaggaagacaacacagtggtggatatagggtccagccctgaacggagggcagatctagaggaaacagacaaagtattgcatggtttagaagtctcaggatttggagaaatcaaatatgaagagtttgggccaggctttatcaaggagtcaaacctccttagcctccagaagacacaaactggggagacaccttacatgtacactgagtggggagacagctttggcagtatgtcagtcctcatcaaaaacccaaggacacactctgggggaaagccttatgtgtgcagggaatgtgggcgaggctttacgtggaagtcaaacctgatcacacatcagaggacacactcaggggagaaaccttatgtgtgcaaggattgtggacgaggctttacttggaagtcgaacctctttacacatcagcggacacactcagggctcaagccttatgtgtgcaaggaatgtgggcagagctttagcctgaagtcaaacctcattacccaccagagggcgcacactggggagaagccttatgtttgcagggaatgtgggcgtggctttcgccagcattcacacctggtcagacacaagaggacacattcaggagagaagccttacatttgcagggagtgtgagcaaggctttagccagaagtcacacctcatcagacacttaaggacacacacaggagagaagccttatgtatgcacagaatgtgggcgtcactttagctggaaatcaaacctcaaaacacaccagaggacacactcaggggttaaaccttatgtctgcctggagtgcgggcagtgctttagcctgaagtcaaaccttaacaaacaccagaggtcacacacgggggagaagccatttgtatgtacggagtgtgggcgaggctttacccggaaatcaaccctgagcacgcaccagaggacacactcaggggagaagccatttgtatgtgctgagtgtggacgaggctttaatgataagtccaccctcatttcacaccagaggacacattcaggggaaaagccttttatgtgcagggagtgtggcagaaggtttcggcagaagcctaacctgtttaggcacaagagggcacactcaggtgcctttgtgtgcagggagtgtgggcaaggcttttgtgctaagttaactctcattaaacaccagagagcacacgcaggggggaagcctcatgtgtgcagggagtgtgggcaaggctttagccggcagtcacacctcattagacaccagaggacacattcaggagagaagccttatatttgcagaaagtgtggacggggctttagtcggaagtccaaccttatcagacatcagaggacacactcaggatagaaactttatgtgtatagggaatgtggtacagcctttagccaggagtcatacttcatcagacaccagaggacacacacagtgctgtggctttttcagccattgctagataccaaagtggagacattctgtgtgtgattatgcatgagactgtactggtaagacttgtatctccatccacctgaaggagaattgctggctcattttcaggagccctgcccttcctcactgtggatggtgggttgtggaaacccggtcaggtaatgatagtggcaggaggcagtcaaatgcccaggcagataggggtgggtacctggtgaaacccaaccttaaagctgaagacagtcccggctaaatcctcatactgaattgagaacctgtcttcccatttggtgtgctttcctccgattgatcccaacccttcacctattttacgtatacctgccctttcctaattggtttttacactgctgtgcccaccttttgagtggtgcctttgcatacttacaaatcagtcaacgtgtattcccctattctgagcccataaaagacccagactcagctgcagtgaggagagaaatcaccctgctgtgggggttggggaccactccctgcatcccctctccactgagagctgttcttttgctcaataaaattcttttctacccatcctcacccttcaattgtcagtgtatcctcattctttttggactcaggacaagcgctcagaaccactaaacatgggtataagctataatacaggcaggccaagagggcagggcacctccagcagcaggcccagggctaagtgagatccaggcagagggctgtcgctggctgtggaggtcctcagttggcaatgtggctgagaaaattcctgtgtcagtaacttgacggagaaagtacttttaaatgggttgaaattaggaaatgaatactattccagtgtcattttacaggtacactggaacattccttccactgtaccctggatgttacagaaactattgcgggaatgaaggaggaccagagagaccatggggtgagacaggaggatttatttatttatttttttgagacagagtctcgctctgtcacccaggctggagtgcagtggcgcgatctcggctcactgcaggctccgccccccaggttcacgccattcttctgcctcagcctcccgaggagctgggactacaagtgcctgccacctcacccggctaattttttgtatttttagtagagatggggtttcactgtgttagccaggatggtctcgatctcctgacctcatgatccgcccgcctcagcctcccaaagtgctgggattacaggcatgagccaccgcgcccagccgacaggaggatttattgagtgcactcagacccagaggattaacatccaaaaactgggcccagaacaaagacagcatttgacttttatacacacttctcaaagtgggtgggctaacttgaaacaagcttacagtggtgcaaaacgtagtggtgcaaaagccaggatacagaggcagagcaaaggcagttaatcaaattgtgacaggtgtataactcaggattacatatgacccttgcttatgcagcccagatggctgttatctaggcttgctcaaaagagccttgcatgggcttatctcataacctttgctatggtgcccagatggctgcagcccaggcctgcctcaggcatgtcttaaaactttcactgtgctgcttagataaaacagaatacttgaagttaactagttacagaaaacaggaatctataacctcataaaacttgcagagcaaggtacaatcacacggagggaggtgggattcgagggggatctttactttttcttatccttatgttgagggagtgctgggagagtctccagagcacattccttcaagcctttgcttctttgataatgttatcgagacctcgcctgggtccaggctttgcctgctaccgcctttaggatgagtcagcctagtatggaaagcttatttttctctttttaaattttattttcttctttctctaatttctgcctcaagacaacaatactagagcttgtcttttgatgtccatctgtcctaactgggaacaagagacttggaagacaccgtggctgatttactatgtgttccccagaccatgaccccacagagtcagcctcaggggagagtttggggaatggttaattcatggagacagggatagtccatgggtagaagagggttttattatatctaggtgactgcaagtatcctagctctaggttttaggaagaggtccatttttaaaaataactttgcttaagccttttggggttttgtctggtttctgggttgaatccacattgaagatatttttattgactgatgtatttagactagaagtgtattgttgttttatttataaaacacacaatatgcagaaatagaaaatgaaattaatttctattctcctttgaattaccaaacaacatcctacaggtaattcttgagtttaaatatttccaaccattgtaaaatgtaccattcttctggttgggaacatatattttttaatggcagtgttcaacaaattaactttaaatactaggttaggtcccagtttgtttgttttttgttttttttcatggaactagactgaatgattctgaattttatttggaaaataaaatttccaagaatcattaggaaaatatagaaactatatagtaacatgtcttgttcatatataagtttttagaatagctctttagaaccatattttaaaaaacagaaaaacaaacccatccatatatgagcattttgaatgcgataaagcaggatttcaaatcagcgtgaaaatggcaatcgtaagattcagtgtttgtgttgttggctatcaatttagggaaaaaataaatgtagatttatttgtttatccaaaggagttacagttagggcatcactgtccaaaatggtaagagatgttaggatcttaatttttgttcaacatctaagtgagtgagtagagttagaagatctggtaaaaaattatgaagtattatcctaggtggagtacttggcatggctggcttttcccagccctcccccatggcaattcatgggctggctttcatacttcttaacagaaaaatactttgaggccgggtacagtgtctcacacctgtaatcccagcactttgggaggccaaggcaggcagatcacaaggtcaggagtttgaggccagcctggccaatatggtgaaaccccatctctactaaaaatacaaaaattagccaagcgtggtggtgggtacctctagtcccagctactcaggaggctgaggcgggagaatcgcttgaacctgggaggcgggggttactgtgagctgagatcacaccactgcactccagcttgggtaacagagcgagactccatctcaaaaaaaaaaaaaaaaaaactttttgagataaactattttataatagtttaaaaactattgagttttaatcccctagagtcttagaatttaattattctcttccataaaattgtgtcacaaaacgatttcaaagttaaacatgttctttttgtgtttaacttttagaaagaatatcacagctttcaatttatttttattttatttaaagaccagtgtggctgggtgtggtagatcacacctgtaatcccaacattttgggagactggggcgtgtggatcacttgaggccaggagttcgagaccagcctggacaacatggtgaaaccccatctctactaaaaatacagaaattagccaggccgtgatggtgcatggctgtaatacccactactcaggaggagaatcgcttgagcccaggaggcggagattgcagtgagctgagattggccactgcattccagcctgggcgacagagtgagactgtctcaaaaataataataaagaacagtgtgatagtatacagctttcaatttaattcatccatataactaagattttgtcttaaattgttaaaaattcttagcaaaaaatagaacagatgctacctgaagacttaaatatatttaaaaagatacaaaccccaggatatggtttctatggagccacgcaaagagaacaggaattgtaagaaaggggtagaaggctacattctatcctttggcccagccccagccccaaccgtgttgattgttaaactcacattaggccctctgctcagaacctctcaggagagaaaattgaggcagataacctgagctgtccacctgggcctggcctggtactaaaatctgtgtgcaaatttggaacctgattaggaggcaagcaccacaaagtattcagttatgtggcttcttctgagtctggtgttttgatgattttccagtctgtctagaaagccattcactagtgctttatctttcccatcctgagatgacagctctagatgtttaaaaccaacagaaacctgtcccagagtaaccactgtccatcctaccattctcacggtaagtagtagactacactacacaaagaaaattttgaagaacagatggtaaacagtatgagacaatatcacctcaaatccacaagtctgttagggtcaccattaaaatgttcaattttaaaagaggtcatagtaagtttttatttgtttatttatttttaaatttttatttatttttattgagatggagtcgcactctgtcacccaggctggagtgcagtggtgcgatcttggctcaccacaacttccgccttccaggttcaactgattctcctgcctcagcctcctgagtagctagaattacaggtgcataccaccatgcccagctaatttttgtatttttagtagagacagggtttccccatgttggctaggctggtctcgagtcctgacttcaggtgatccacctgcctcggcctcccagagtgctgggattacaggcctgagccaccacgcctgatctaagtaagtttttaaatagctatttcatttaattctaattattatgtaacagtggttatctaagtgtggtcagataatgtttgggggccaggcacagtggctcatgcttgtaatcccagccctttgggaggctgaggcgggcggatcacttggggtcaggagttcgagaccagtctggccaacatgacaaaacctcgtctctactaaaaatacaaaaattagccgggcatggtggcgcacacctgtaaccccagctactcgggggctgaggcaggagagtcacttgaacccgggaggtggaggttgcggtgagccgagattgcaccactgcactccagcctgggcaacagagcaagcaagactctgtctcaaaaaaaaaaaaaaaaaaaaaaaagagacccgaaagaatgaaaaacaaaagtatttcattctggaactagacacagaatgaagacattgtgtgaggacctgagctgctgcagctaccttgcaaccacataaagcaacactgccaatacattgaggactgcagagcaggaggaaggattcttgctacaattggtcacctgctaagccaactgaacttcttgctaagtggggaaataaatatctttactgtataagctactttcagttgagcatataactgtataacttcctattaaaagcatcttaattgaaattcccaaattcgtatctctagtaccaacatttcactgagctccacacacatatatctaaatgcctacttgatatcactcttttgaaatccaacaagcatctgcgacttaacatgatacctcaccacccaccccatcctagataactgccacatactcattttcccctatcttagtaaataacactaccatttttccaggggctcaagacatttaggcattatattgaacttctctctttccctatattcacaaccaagcatcagcaacttctgttagttctacactcaaactgtatcccaatctgacaatttctcattgcctcttccagtgatgaccctaattcaaaccaccatcatcataagaccattggtctccaaaatagtttatacataaatgagcctgtcattgacatgtagagacctgggtcaacagtacagatggaggtccccagccagtccccttctgttcccactgccatccttgtcccacatcgtaagaggtcttctattcccacatgtggacactccagcttgcatatctaagctctgtctagccttaccaaattgctctcatttggccacattttgtggataggcagcacattccacctttggaagacagatcaagggaagggtctttggacacagaggagatacaggctctggaagcaggctggagtccatttgaacaggaaatcctggggatttggatacccagagcatggtctgaaagaaggttgtgagatctttgcaggcatgtttctgcctatggactttcaccaggaaggaaactgcttgactagaggagggccaaagtgtggccttttgtatgtttaataatattaaaatgttaaatatattattttgaccaattgagaaataataataataataaaataggccgggtgcgatggctcatgcctgtaaccccagcacttggggaggccgaggcaggtggatcacaagttcaggagatgaagaccatcctggccaacatggtgaaaccccatccctactaaaaatacaaaaattagctgggcgtggtggcaggtgcctgtaatcccagctcctcaggaggctgaggcaagagaatcgcttgaacccgggaggcggaggttgcagtgagcgccgagattgcctcaataaaagataccacagaccccgcccatggcaggagatgggggtgaaggaacagtaagaccaggagacagtcagatacacatcggatcagtggtatcctcacagtaacagaaacggtcacccccaatgtcagccacagtctctttcatccacaatcactttcacattcagctacccacaatcacgggacgtgatttaaaatacagaagctccctgcactgacaaaatccgccgctcctttcgtcggcaagcataaaggtgtgcagcaacagtcacacacgaaccaccacacccaagcattcaaccagtcagccccgcgcgcagcctggccgctttccccaacacagcagctcaaggtcactggagagcctacgaccgcacacagccctctccggtacctgcccccgtggcgcaggcgcgcagtggagggggccgcggggttctctgggagatgtagttcaacgatgacggccgtggcgcaaagcgttctggggctcgtggttcgcggggtccatggggaacgcggtgtcgctggttcagatctcgcagagctcagagtcctgcatgcctcagtcctcgcctcgctcctcctcgcggaggattctgggaggtgacgtcgcgggtctcggtcgcggggcccgtttgcagagcccgcggcgccgggaggtgagtggggccgggccccgggcgggagcgggaagtcaagggcgggctccgggtggcccggccgcgccagggatgggaacccggcaggagtcgctggggaggccgtgtgtgtttcactgtattaccaactatgtgacaggctgcgggtgtgacagaatgtgatcttgtgtcactgtgtgtgtgtgtttgtgcgcgtgcgcccgcttgtgtgtgactgtaaccatctgtgtctgggggtgaaactgtgaatatgtgtgtttgtgtgtgactgtctctgcaggtgtagctgtgtatgtgtttatgagagactggggtgtgacattgtgtgtttgtgtaaatgcatgtgtgtggttatgtgaccacctgtttctgcggatacaattgcgtttgaatgtgtgtgacagcaagtgtgattgtgcgactatgaccatctgtctccgcaggtatagttttgtatcagtaattgtgacaagatgtgtgacttctgtggtatgctactttgtgtgtgattgtgtgtgattgtttatctctgttggtgtagttgtatgttaccatctatctttgtgcttatgtggctgtgtattgtgtgagattatgggtgtgtttgtgtgactctatacatttgtgattgggtgagaatttgtgtgtatatatgagattgtgggattgatgtatgaagcacagaaatattagaattacccaagttcacacagttaacaagtgacagcaccagaactcaaacccaagcagtttagctctagaggtctcgcttttttttttttttttctcttgagatggagtctcactctattgcccaggctggagtgcaatgatgcgatctcggctcactgcaacctccgcctcccaggttcaagtgattctcctgcctcagcctcccaagtagctgggattacaggcgcgcaccaccacgcccagctagtttttgtatttttagtagagacgaggtttcaccatgtttggccaggctggtctccaactcctgacctcatgatccgcccaccagagcctcccacagtgctgggattacaggcgtgaggcgctgcgccctgctgcagtttttatggacaatttcaagctgcactacactaaggaaataactgctagggactgagttgcctagtgcaaagtagtccagaattagggggtgaaattagggggtgatgtatactgaattctaggtcaaccacagttgtccctttcttttcttttcttttcttttctttttttttttttttttttttttgagacagagtcttgctctgtcctgtaggctagagtgcagtggtgcaatctcggctcacagcaccctctacctcctgggttcaatcaagcctcccacctcagcctcccaagtagctgggactacagacacatgccaccacgcccaactaattcttgtactttttgaggagatggggttttgccatgttgcccaggctggtcttgaattcctagtctcaagtgatttgcccaccttgacctcccaaagtgctgggattactggtgtgagccactgtgcccagcctgtctctatttttacaatgaagaaatgttggctctaagaggacaaggaacttacttcagattgcccagtttgttgttgctttagtattaaaatttggcgatgtttccctcaggctgcatttctgtagagaaataaaggtaacacctgccatctctaaagatgcctctctaaggaatatatggcattgattactcgggttgtgttgaatatttcccattcagacatcgtggcctctcaaaagaggactggttttgaggtcacatttcagttggaccccggactttgagttggttgtttaagcttctggaacctcccttttactaccagtaaagtggagatattaatacctatctttgtagttttgtggagcagtagtagttctgaggattaaatgagataatgacacaatgagataaccatgtgtgacagtctctctatctttgtgctaatacggctgtgtgtgtgagagagagagattatgccaccgattgtgtaaatgtgtatatgtttgtgattgggtgagaattttatgtgtatgtgagatcacgggattatgtcggacctagtctgattgtgaggcacaggaagattaaaattacttgcccaacacagcatgagttaacattgtatatttatattacataaggcacagtaaaatttatttattcatttatctaattttttgagagactacaatggtctggtggtgttctgtcattagaatacacctgtgaaccaaacaaaacctagttctcttggatcttacaatcttgcatgggaagagaaacaataaagaaacaaagcagtatgtaacatgtccagtggtgataaatgctgagaaaaaaataattcagggtaaagaaaaatggagtacctggaacaggggttcccttgaggtagaattttcagggaagtccctctgatgaagggacacctgaatgcagataggaataaagaggagtggcccatgctggtgtctgggagaaggttccagacggaaggaaaagtccacaaccctgaagaaggggtgtacagtgtttgagtaacagtaggaagacatgtgcctggagtgtggcgagtaaggggcggaagggtaggaaattaggtcagaggtgcagccaggggccagatcatgaaccaccttgttggccgtaggacagactttggattttgttgagttcaggctatgcgtccttaatatataagtcaagactttgggagttaagttcagcattggattccaccccgccaccctggccagatcttggaaaaggtgaggctggcccatgtagggagaagaaaggggcagtagtatttttgtgggtcttggaccaaaaacacagggctggcacatcatcatttcttcattaactctcccttctcaggactttgttcttcttcagaagagaaaactgaagaaggaggaatggctgtggggctttgtaaagccatgtcccaggtaagcatgctctttcactttgttttcagacatttgacctcatttttcaggactttgggaccacagggaaaatcacaaatagcccaatgagcaccccttccacttctctctccaccttttgttcatataatccttctacaaaacatttaatatcttttttagtcagtgttatgctcaaatgtgtgatggagcagagctatcctctttagatggatgatgatttgttgagtcggcaatgagtgcaagtgaaataagggatagagtttgattactgagtgatctattaaatagggaggtcaaggatggcctctctgaggaagtgacatttagcaaaacaaaacttcagtgaaagtagcaagtaagttttgtggagatctggggaagagctttaaaagaaggagtacaaagttattatggtgggaacatgtttggtgtattccaggaatagcaatgagtctgtccttggagggaaatgagcactgtgatgtcagaggtatagctgggaaccaaattacgtaggccctttcaagtcatgatctgaactttgaatttggttctaagtgaaggagagccattggaacgtttgtgatctgatttgatttatgccttaaagtgaaaacagatagcaggggagtacaggtggaagcagagaggccagtcaggagactcttttagtaatccagacaggaggtgatagcagcctggatcatggtggtggcattggagctagtgagattctgggtatagactggagatagaaaatgcgatttgatcaaggattcgttgtggcatgtgagaggaagaagtcaggatgcctacagagatttttggctaggcagctacatgaatgggcatcccatttactgagctggaaagacaatgtgaagtgggatggatatcaataattgaattctggatatatttagagaccttttggatatccaaatggaatgctgattatacatctggagttcaggactacagatgtgaatttgggagtccttagtgtattttctttctttctttctttctttctttctttctttctttctttctttctttctttctttctttctttcttttctttctttctttctttctttctttcctttctttcctttctttcttttcttttcttttttttttttgagatggagtgttgctctgtcgctcaggctggagtgcaatggcgcaatctcggctcactgcagcctctgcctcctgggttcaagcgattctcctgcctcagctttccgggtagctgggactataggcacacaccaccacgcccagctaatttttgtatttttagtagagatggatttcacgatgttggccaagatggtcttgatctcctgacctcgtgatctgcctgcctcggcctcccaaagtgctgggattacaggggtgagccagtgtgcccggctgtccttagtgtatttaaaacatgagacaggatgagattatcttgagggcagttttgtggtgaacgtagataggaaagagatcgaaggactggctttaggatgttcaacattcagagccacacaagaagaggaggaaccagcaaaagagactgagaagaactgatgtagaaggaaaaccagaagagtgtgggttctggaagccaagaggagaaagtgtttcaaggatgggatgatcaactgagctaagttcctctgagagggactgaagaagacgaagactgagaactcaccgttggatttggtaacatggaaatattcttgacaagagctacttcatggaatgactgggatgaagacatcattgtggtgggtttaagagagaatggaggccgggtgcggtggcttatggctgtaatcccagtactttgggaggccaagatggcgggaccatcgcctgagcccaggagttcaagaccagttatgtatgcagggcaacacagggagactccatctctaaaaaaatttttaatactaaaatccaaaaacataggcatggcggcagatgcctatagtcccagctgcttgggagactgaggtgggaggatcgcttgagcccaggagtttgaggcagcagggagctatgattcatgtggtacacattacagcctgtgcaacagaaacagagtgagaccctgtcttaaaaaaaaataaaaaataaaaataaaaaggctaggtgcagtggctcatgctcatgcctattatcccagcactttgggaggctaaggcaggtggatgacctgaggtcaggagttcaaggctagcctggccaacatggtgaaaccccatctctactaataatacaaaaatcagccaggtgtggtagcgcatgcctgtaatcccagctactcaggagtctgaggcaggagaatcgcttgaacccaggaggtggaggttgcagtgagccaagatcgcgccattgcactccagcctggggcctgggtgacacgagtgaaactccatctccaaaaaaaaaaaaaaaaaaaaaaaaggcaggaaaaagagaatggaaaacgaggaaggtgagaacaaagacagtgaatttagacttacagtagtgtagccagcaggcacatatgagtactctaaattgtgatacactgtaagtgcaaagtatataccagattttgaagattcagtacaaaaaagagtgtaagaagtctcattaattttttatattgattacatgttgaaatgataacattttagatatgttgggttaaataaaaatgatattttttctatttatttttttcttgtgactactggaaaatttcaaattacatatgtgactcaagtatttctggtggataacactggtctaaacaacttacgggaagagttttgttattaagaggagtagagaaatgggacaatagctaaagggagatcatggaagggaacttatttatttatttatctatgtatttatttgcaagagggaagatattgcatcagtttttttgctgattggaatgatccagtaaagtgagaatagttggtagtaaaagggagagaggcgaaaatgtcttcgtgtgggcaagtggacggactggtctttgaagcctagagttttattcatagtcacagagggcagacagaatatacaggtatgagtacagatacagaagggtaagtacatatggtggctggaggatgaggaagttaaaagtgagatcgggatgagttgatggtggttcgagagagagttatgaaatagttatcaggagaggaggagagtgaatttattagggaagcatagtagagtggttttgcagtgcttttgaggacattctggccatatgcaagaagtactttgtgtcaacatgttttatcaatcagggttctagcaaggcaatcaaaaggcaactatttaaaagatattatcaggacatagagaaactataaaggatcatgctgtactctggggctcataacagcatagctctcttactaaccctagatctttgaatccagagacagagagctgggtggaggggcccctgacaggtgctctgaactttgattgaaagacagagaccacccagggtgggactcccacccagggagggagccaggggaataagtattctgccttacttaccttcctttcatctcttgcttgtggctgaacccaacagaatatgggatgggacaacggagtttattgatacagtcagcctcctaggactcagaaaagagtagaggagcacatggaagttatacaacactatggagttgtgtaaatttttccctagacacattcagccatagccataattccactatgtagaataaccatatttgatatttcttttctttttttttttttgagacggagtcttgctctgtcacccaggctggaagtacagtggcacaatcttggctccctgcagcctcctcccgagttcaagcaattctcctgcctcagcctcccgagtagttgggactacaggcacataccaccatgtccagctaatttttgtatttttagtagagacggagtgtcaccattttggccagactggtctcgaactcctgacttcaggtgatctgcctgccttggcttcccaaagtgctgggattacaggcgtgaaccactgcgcctggcctgatatttcattatttttgattaaaaaaagagaacatactgtacatactggaaccctatcatttttaagcactgaatactctttcttcatatggatattttataggaaacttcaccatttattccctgagtagcaaatatttactgagagtttacaatgtgatcagttttgtaatagatactggatatatatcagcttataaaacaaatctctctcccttcactcagcctacagttcagtgctatagcctaaactctatttttgaacatgtaagttttttccagattttttgcataaccttccaatgaaaattctatctaagttgcttcacatatacctcattatttcttcaggatatgttcctggacgtttctccttacatataaagtctaactttcaggccatacccttttgttaaagcccaattcaaggcctttctcctattctgccccacctgatgtctcaatttggggaatataaaggaatcccccatataagattttctttatacttagcatatgtaacatacaacttagtctttgctgtttcttgttataagctaattttgtgtatatatgtcttttttataaaaatgtaaaattttcaaatggtgagtctgtttctaatatttctcttctcttaaagtatttgacaaacctcagcatgtaattgttctccaataattattttcctcgcatcacttagagctttgaactctggccaaattcatcttttttgctaggaccatataggtgtctgggcacctggtgaacaagaatttttttatttcaggggttggtgaccttcagagatgtggcgctagacttttcccaagaagagtgggaatggctgaagccatctcagaaggatttatacagagatgtcatgttggagaactacaggaacttggtatggcttggtaaggatgtttctcccccataatttaaaaatcttcctctggggtgtttttgcttcctctgttgagaatatctaggacatcttaagacatcttaaaagcacttacttgcctttctacttcctgttcccaggaaatgatttgaaatatatatttgcttaaattttaattaattaatttacttttggcagacattctgaacacatgaagtaatttctttttttttttttttttttgagacagagtcttgctcttgtcgcccaggctggagtgcagtggtgcgatctcagctcactgcaacctccgcctcctggattcaagcgattctgctgcctcagcctcctgagtagcagggattacaggcgcccaccaccacacccagctaatttttgtacttttactagagatggggtttctccatgttggccaagctggtctcgaactcctgacctcagatgatccacccaccttgacctcccaaagtgttgggattacaggcgtgagccaccgcgcccagcatatgaagtaatttcatagagttggaaatgagtagttccctttgccgtagaatggtggtttggaacagcaacatcagcatgtcctgggaatttgttaaaatgcaaattatgaggccccattctagacctacaaaatcagaaactgtgggagtaggctcagtagtctgggttttaataaactctccaaatgatcctgatgtctgttaaagtttgagagccactgtagtttctgatgcagtagttctgggttgcggcctgagaatgtgcatttctaattagttcctaggtgatggctgcagctgctgtagcactttgagaaccactgtcacggcagaagcttcatcctcctcctcatccatacaagcgtcattccattctctagctcttcctctaatgtccattcttgcctgatgatcaagatattgggtctgcgtcctagacagctgtggcatgttgatttgtttgtctgtatgtctttctgtctcttgctctcatttttcttcccctgtgaacaggactctccatttctaagcccaacatgatctccttactggagcaagggaaggaaccgtggatggtggagagaaagatgtcacagggtcactgtgcaggtgagtgacagatcaccaggcagggaggactattgtaaggtactcaaccaagtagtaagtaggaaactgttttgagcttcaggtgggatgagaactgaaatctccatagtatgtgcttccctagaaacctcaccacaccctggggttttttctttttctttccatcaaattatactctccggtcttccacctataccttgaatctcaatccttctcagctcttcttttccttttatggttagaattgtattacatttctagatttctttttcagagtttttatttttatcagaattatcaaagatatgtacacacagtgtttaaagaatcaagtagtagtattaggttggtgcaaaaataattgcagttttgccaaaaaacgcaattacctttgcaccaaaaagcctatacaaggctttttcccttaaagaaggaattcttgttcccggctccccagtttccctcttcctagagcgatccactttcttttcttttgtagtttattttggtgttcccttcatgtctccaaaaatatgttaatgttgctactcttgattttttttcagggtgagcccttattcggtatcttcttataagaaaataaggagttagcactttcttctcctgaatccaacacataaggcacacacacaaatacacacatttcccatcccctatcttatcaatgtcatcattttgattaagtcactattcagcatttattttattatggccatttagtgctagtcatagctgtgctgtgcatatggcaagttactttttctctactcctttttatttttcctggagttaataatgacttgggaattttgtttgtttgtttgtttgtttttgctcagtttatatatacataaccctaatccagttcccgacttaccatcaattgtctgagtctttcaagatacttggacatattaggtgatctatccacttcatcttcttggagaaatctctcctggaatcctcagatacgcttcactctacacaaatggctcattatatttgcatgcactcaatttggatctatctgatttatctgatattttctcataattagattgaggtagtgcatttttgcaaagaatgtcacagaaataatgttgtatctctctcagtgcatcattccaaaggatgtataatatcgatatgtcttattatcggtgatgttaactttgcacacttagtgaaggtagtgtctgcttggtttctccattataaagttcttatttttctatttgtagttaataaatatcttgggggagatactttgagattattcagtttcttctgtaatttttgcccatttattttagcatttattgctggatctcttcaactattattactgtggtattaacctaatgttgatttgttccatttccctcttttctttgtgtatattaattgggattgttctgaaggaagagctgctctttctcctccatttacttatatattcaattatatttatggatttttttcctatgaggtaaatctaatttacctcataaaatttaatgacttcataaaatttaaatggatttatttttggatttatggatttttatttctatgaagtaaatccaatgaatcattatgtttctcaaatcgttccagctttgaatgttggaatctccttcacattggttcctttgaccttctgacatgcccccatgcattttttgggcacgtccttccttctggcacaaggtattccaggttctcttattttccttgccccagccttgaatcaaccacttctccaaggagccctcattgctttattgggaaatggtgtttagaaaccaagctaggtatgctctaggctactgggatatcactctttctggccctgacagcagctaaagctaggaaacagatagatagataggtagatagatagatagatagatagatagatagatagatagatagatatttacacacacacccctatatttatttctgcctctttttttcccattttttattacctctatctttttatatactaaaactatcagtttatattaataacttgatttctagtcctgctttacagggtttattgtagccttcctccttgacttatttgtaatttctttttctgataatgagaaaaaatatatttacctatttgttcaattttagtatacacataaagtagtttcagaatttctaacttacttctctgtgagaaacaaatttaccaactagatttaggtatttgtatatagtactttttgttttagtcttatagtgtccagtcaaaatactatttccaaaattacttaggttggttatttcaggtccatttgttactgtttttgtttgagatggagtctcgctctgtcaccaggctggagtgcagtgggcaatctcggctcactgcaagctccgcctcccgggttcaagtgattctcctgcctcagcctcccgggtagctgtgactacaggcgcatgccaccacgcctggctaatttttgtatttttagtagagacagggtttcaccatgttggccaggatggtctcaatctcttgacctcgtgatccgtgccagccttggcctcccaaagtgctgggattacagttatgagccaccatgcccggccgtatatacgtagttttataaggaattgctacattcccctccagaaaagttgtctgcttagtttttttcctgctgtaacaaattagcacacatttagtggcttaatccaacacaaatttattgtagctctggaggtcagaagtaaaaagtaggccttacagagctaaaatcaagatgtcagcagcctatattccttcctaaaactgtatgggagaatgcgtttccttgattttttatgctttttttttgagatggagccttgctctgtcacccaggctggagtgcaatggcacgatcttggctcactgcaacctctgccttccaggtacaagggattttcctgcctcagcctcccgagtagctgggattacaggtgctcaccatcatgcccagataatttttgtaattttagtagagacagggtttcgccatgttggccaggttgatctcaaactcctgacctcaggtgatccacccttcttggcctcccaatgtgctgggattatacaggtgtgagctaccacacccagctgattttttttttttttttgagacagagtttttctcttgttgtccaggctggagtgcagtggcgcaatcttggctcactgcaatctccacctcctgggttcaagcgattctcctgtatcagcctcccaagtagctgggactacaggtgcgtaccaccacacccagttaattgttgtatttttagtagagaccgggtttcaccatattggccaggctggtctcgaactcctgaccttgtgatccacctgcttcggcctcccaaagtgctgggagtacaggcatgagccaccgtgcccagcctattttccactttttaaaataactttaagtgtagggcttatatacaatacagatttgagttttactatataaaccaatctgattttcttttcattttaataagtgaaagtctaattacatttttggtaaatttgggcttaatcctatatattgtcttatgttatattttctgggttttatagtttttaaaaagcactttcaggctgggtgtggtggctcatgcctgtaatcccagcagtctgggaggctgaggtgggtggatcacgaggtcaagaattcaagaccagcctggccaacatggtgcaaccccgtctctactaaaaatacaaaaattagctgggcgtggtggtgtgttcctgtaatcccagctactcagaaggctgaggtaggaaaattgcttgaacctgggaggtggaggtcgcagtgagctgggatcgcgccacggcacttcagcttgggcgacagagcaagactccatctcggaaaaaaattaaaaagtaaaaataaataaattagcctgacatggtgctgtgcacttattattccaactacttaggagactgaggtaggagggtcacttaagcctcggaggtcaaggctgcaatgagctgtgatagtgccactggactccagcctaggctaggtgacagagcaagaccctgtctcaaaaaaaaaaacaaaatgtgtaccttgaagtaaaattgctggaacatggaagtgcatgttttaatttacaagatactcaacttgttctgggaagtgattgtatcagtttatgctcgtactaacaatgacagtgtctgagaatggcatttccttcctctcttgatattcttcaacttaagcttttgatattgtccttaatattgtctaagtgaaatttctgctgatatgaggaagggaaatgctgttatggttttaatttactagtgatattattgagcatctttccaggaatgcattgtctataaagtttttctcttctgtgaattacctgctcatacatttttttgttttgttttttgagacaggttctcactctgttgcccaggctggagtgcagtggcatgatcttggctcactgcagcctatacctacggaactcaagcaatcttctcacctcagcatgcacaccactgcacctggttaatttttttgtttatttttcttgtagagacgaggtctcactgtgttgcccaggctggtctagcactcctgggctcaagcgatcctcccatcttggcatcccaaactgttgggattactggcatacttccacttttggagaattagattatttttctttttcttactgatttgtagtagaactaaattctgggcattattcatttttctatgatatatgttttagttgttttttctcagattgtcccttgccttttgactttgtgttttctcccgcacacaagttttcaaggttaatgtcaaattcattcctttcaaccagatgtcgtcaggatggtagtgaggaggtcatgctccccttcactgtgttctctgtgtcttgcaggtttttaatgctgtaagtgtgtttctcttgatatttttttcatgaccttttccacaatgatagggaattttacaagtcaaccctggttgagttctttcacagagattttggtggaagaaaggtataaaatgcaagggcttaggtcctattattggttttggaatgttctttttttgttcataattttcttttatattattgattacttttgtccaagtttatttaaaataattttcttaagttctgaaataaaatccttatggaattctggttgaaactgatctgatgtaaattaacctgtggtaaaaacatatgcatatattatttttttgctttgttgcaattatatattacatgggttcatttaaatcttccttagaagaatttcgtaacattttgtaggactttttttgtgttcttgccaaccttactcccttctctcttccaattacttacatagcagttgtaatctcaactcactgccttcacctcaggttctcttccactgtcttatcacttgtaatctggcttctgcccttctagtttagctacatccaggtacccttcttcattttcatatccttcagcttattgagatgtataagatagttcttaccactatccattttctcttttcagagctctgttctccctttaatggactctttcccctgtttttctgttgtttcctcgtttaccataagatctttgttgtattaatgtggatctctgtccagttctgtgtagtagaactttcttttctcttcttttccttttttttttttttttttttttgagacagtctagctttgtcacccaggctggaatgctgtggcgtgatcttggctcactgcaacctccacctgccagttcaagcaattctcgtgcctcagccacctgggtagctgggattatagatgtgagccactgcgcccagctaatttttgtattttcagtagagacgaggtttcactgtgttggccaggctggccttgaactcctggcctcaagtgatccaccagcctcggcctcccaaagtgttgggattacaggcgggaacccccatgcttggcctctagtagaaatttctctgatgatggaaataatctatatgtgtgctttctaatacagtagccactagccacatttagctttgagtgcataaaatgtggctagtgtgagtaaggaactgactttttaaaatgttatttaaatttaaattgctgcttatacttagtggctaccgtattggatagcacagctctatacagtcttttaatcaaggggatccaatctgtaagtctatatgtaaagatagtggttggagctccaggcacctcagagtctcccatgttggaaaataactgtagtcttctcccatcaggcttcttttattcagcattaagttagttattgtataaatctgctatttgcctggagtaaagacttatttttggtaagatggagtatagtggcttcaggtgatgcctacaagagatgagatccaggcaagtgagtgagggaacagaagtagttgtatttctagggaaagaatgaatggtatggacctgacaaaggacaggcgaacaaggcctctcaggcctgggtgtagacaagtaagaaaatccaaggcggtatataggacggactggtagggatgaggctttccttgggtgaagggtgtattggaaagaagaaagatacagatgaataatatttccttttcaattttgttctgacctatactggagacagctttacttttcaacagatgagaaactgttatggcaaagactgtatctatttaacccccaaatgccaaaatacgtagttctaaaataatccgtaaccacatctaaacatgaaaatgtctctgtcactgaaatagtcactatattttggaatcctgattatagccttgaacaccaagctcatattctccgagaattattccttaactaagctagtgagttttgatctcttttttcctgacatttatacctgtaataatctatatcatattagcttatccttcattatgtgccatatggaattatcacctgcacaggcttgagctctcagaatttacaaaaggtagaaagaccttgtgtcaggctttcccccctctactaggtacttcagacctactaataggttctatgtatttgaatatattggctgattattgtggtgtgaaaggactttctcattttttgagatcatcttctaaaaaatagttttatttctaccttacccaaccaatatcctctcctgaaagtatcacgtatcttctcaataggcatcattttcccttaatggtgagaaaagctgaccactaggtttcttttagtcactgagaaaaaatatatataaatttttcctggaccctgataaaaatcttagaagttgttgaacagcattagtggaaaaagttgctatgagattaatctggcagcagtcatccatttaacaacatgctgacattgtctgaggcattggatgcaatagtagaagaaaaaggggtgaacatccatccctgccctcatggagctttcagtcttatgaataccagtgcagaatggacaggagggcttaaagactagaggcagggaaactggctgtgatctaatcagacatcctcaactccttatcttgttagcatttagctttgcctgccttttgatgacctgcattttacctgtgtccccaactaccacctccctatcgtcaacacatataccttcccttctcagctctctttattctttgtgcttccattgtcttttgttcatattgcatggccatatttgggagctattagaaccacagactttctaccctccttccccccagttaaattcttccatttcttctctaacaattttcttcctcatagcaaaagaacaaaggagacatttgctttcttgatatttttcagactgggagtcttggtgtgaaattgaggaattatctccaaaatggttcattgatgaagatgaaatatcccaggagatggtaatggaaaggctagcaagtcatggccttgaatgctccagtttcagagaagcctggaaatataagggtgaatttgagctacatcagggaaatgcggagaggcatttcatgcaagtgacagctgttaaggaaatctctactgggaaaagagacaatgaatttagtaattctgggagaagcatacccctgaaatcagtatttttaacacaacagaaagttcctaccatacagcaagtacataaatttgatatttatgataaactcttcccccaaaattcagtcataattgaatataaaagactccatgctgagaaggaatctttgataggtaatgaatgtgaagaattcaaccagagtacgtaccttagtaaagatataggaattcctcctggggagaaaccttatgaaagtcatgatttttcaaagctcttaagtttccactcattatttactcaacatcagaccactcattttggaaaattaccccatggatacgatgaatgtggtgatgcctttagctgttactcattctttactcaacctcagagaattcacagtggagaaaaaccatatgcatgcaatgactgtggaaaagcctttagccacgacttctttctcagtgaacatcaaagaactcatattggggagaaaccttatgaatgtaaggaatgtaacaaagctttcagacagagtgctcaccttgctcaacatcagaggatccacactggagagaaaccgtttgcgtgcaatgaatgtgggaaggcctttagccgttatgccttccttgttgaacatcagagaattcacacaggtgagaaaccatatgaatgtaaagaatgtaataaagccttcagacagagtgctcaccttaatcaacatcagaggattcacactggagagaaaccctatgaatgtaatcagtgtggaaaagccttcagcagacgcatagcccttactctacatcaaagaattcacacaggagagaaacccttcaaatgtagtgaatgtgggaagacctttggctatcgctcacacctgaatcaacatcagagaattcataccggagaaaagccctatgaatgcatcaaatgtgggaagttttttaggactgactcacaacttaatcgacatcatagaattcacactggagagagaccatttgaatgcagtaaatgtgggaaagccttcagtgatgctttagttctaattcaccataagagaagtcatgcaggagagaaaccctatgaatgtaacaaatgtggaaaggccttcagttgtggctcatatcttaatcaacatcaaagaattcatactggagagaaaccctatgaatgtagtgaatgtgggaaggcttttcatcagatcttgtccctaagactacaccagagaattcacgctggagaaaaaccttataaatgtaacgaatgtgggaataattttagctgtgtctcagcccttagacgacatcagagaattcataatagagaaacgctctgattataacaagtataggaaagaaaacatgtggttaccactcaatccttattaaatattagtgagttctttttggttagtaattctttgaatgtagttcatatttcagttcatgagtatccgttatttgaagtagctcagtagtagacatctgttacttttttttttttcagacagagtctcgctctgttgcccaggctggagtgcagtggtgtaatcttggctcactgcagcctctgcctcctgggttcaagcaatcctcctgcctcagcctcctgagtagctgggattacaggtgcctgccaccatacctggctaatttttgtatttttagtagagacggggtttcaccacattggtcaggctgatctcgaactcctgactttaggtgatccacacgcctcagactcccaaagtgctgggattatgggcgtgagccaccgcgcctggccacatctgttactttttgatctgttctatacctggcttagcccaccctcaatgcatatgattcagatgaaactgttaatcagggacagcagtggactggtcacaggctggccaattatttcccccaacctagtgataagggattggcaaatggccctgtctggatcaatgaagtcctttgcgggtattcctatgggcagtaagagaggttttattctggaactgcaagtttcaaggatttaataagattaaaaactcaccagtagcctttttgccactcatgaggaaagctttcccaaagagaaatctaacagaggaaaatggagatgagagacagaaatatgatgatacagcttgatctcctggatccagtcattcctgacagctacaccatcaccatcctttttcattttttgtgatccaataaatttcctttttttgcttaatttggattatatttttgcctcatggaattagagtgctgattcacacattctatgtttgctatacataaaagaaagccttaattttttacgtggcataattatttatcctgaggagcaaccttctgatataacaagtttatgaaagttgaatacacagccttcataaaactgagataattgttacattttatttgtcgataaaactattttagtgtttcttagtttttttcacattatggctgaatattttaaaattcaccaagtaaaattctttaacaggcttccccttaaggagttaaaatcatttgtcacagtgactcaccatttgcctgtaaagagagaatggaaagctaagagaataatactttcatttgtttaatgaatggctcttcatcttcaaggaattacttgattttcttctttcagtatgggtctaaacatattctgtggcagaatataataacaattaaattgtaaatgaggtcttttgtgggtgggctctaaatttggtttaagacccagtgcggtggctcacgcctgtaatccgagcactttgggaggccgaggtgggcagatcacctgaggtcaggagttcgagaccagcctgaccaacatggagaaaccccgtctctactaaaaatacaaaattagccgggtgtggtggtgcgtgcttgtaatcccagctactcaggagggtgaggcaggagaatcacttgaacctgggaagtggaggttacagtgagcgaagatcgcgccattgtactccagcctgggcaacaagagcgaaactccttctcaaaaaaaaaaaaaaaaaaaaaataaataaataaataaataaataaatttggtttaagaagtgtatggataacttctttgcagctagagatatcaaacaaagatattgctggcagaaagaatgagtcatttttaacaaatggtaaaagtaaagcagttaatgcctaaaatttttagagactaaatcatttccattattgggagtaatgaggaagatgaaggtgtagggcaatacgtttcttttttatctgagtggatatagggaaataaactggtgatatggcagctgggccatcttgaatagtgagaaccagtaagaatattgggtattgcctgaagagcatctgtaaaaacatatcagaacaaatgaaagaggaaagaatgaaggatttatatgtgtgcatagagtgaatatatgtgtgcatagagtgaaatattcaacttatacttatttctaataaaatctgaaaattatttttcataaatattcaaattccctttaaacagcttaaaatacagatttagtgactcagtacttcaaaccttgaatagaaacaaatatgattataaaatatttccaaacttatgttacatctaatctgaaacatattaatattataagcttaattcatgtcatcatttctttattttttattatatttcctggaggtataaggatatttatttttataatttccaagcactgagtaataatttatttcagaaagtttcagaaggttacagtaaactttaccaaacttgaagaagaatgactcagatcagtaagaagagtctgagttactcactaattgatttttattttatttatttattttttttgagacagggtctcactctgttatccaggctggaatgcggtgacacaatcatggctcactgcagcctcaacttcccaggctcaagcgaccctcccacctcagcctcctgagtagctgggactacaggtgtgctctaccacacctggctaagtttcgcgtttttctgtagagatggggtttcgcgagttgcccaggctggtctccaactcttggcctgaagtgatttgcccatctcggcttcccaaagtgctgagattatagggatgagtcactgtgcacagctactaattgatttttgatctatgtatggcacctgatttcatcctcgagagtgacgtaaacctaagctactggttcattctctgtttatatagttaaacttcacttgtaatgttgataaaatcttttgtacccatgtgtttagcttcagtgtattttacaatctgatgtttctcctcacaatgaagtactaaattttgtttcttttcaactgtacaacccattgtcttgtgatatattgacctgatctcttaggattagtgaaaatttatgctttattaatatttgattgttattaggaccatctagagatttctgtttatgtgtgtgtatgtgcatctgaagatgtgtattttatttaaattttttgtattaagtgcctactgtgtgccaggctttgttctaatctaagcaatggagatacagcagtgaaccaaacagacaagaattcctgccttcagagagctaatttctaataaggaagacaatgaaaaagatatgtaagtaaaatatataatatgtaagaaagtaaattccaaggtgaaaaagatgaaaaaagggatggggagccagggaaggcccttctgaagttaacttttgagtgaagacctaaaagagaaatatctatctatctgtctatctacctatctctatctatctatctatctatctatctatctatctatctatctatctatctatctatctatctactcatccatccatctatccaaactacatatatatacccacctatagacacatttatatgcctttatagctaatgggaaggaaatctttagtggtatatatacatttacactttatacttactaatttattctcattttatcatgtctacatatttgtgtgttacattttaacacttgactcagatgaattatggccttttacaatctaaacaaatttcacttaattatagtgtatttaatgttggtgcttaattgtcagaatgtagccactggggattaatttaagaaaactccttgctccctccagtacatgaattttggacaaaattgctgccattatgattgagcccgttttagagatcgctggggaaaaaaatgtttcctttttagaacatggtttcatgctgatttctggttctgtctcaatatattttgttataccctactaagattttcaactttattcacaaaactcgagacagggaggtaatagattggatggtggagaaaagtagattgctggaagccatgaggtggcgatacttcactaacagaggaataagtcgccttcctggacagctttcttagacaggtatttacacagcaatttctcacatattctttgagaaagagtagtgaaagtatcagctctttggatattgggacaagtatggactttggagttagacctacatatggatgtcaactctttgtcaggagagcttgaataagtgattcaggctcagtttagtcatctgtaacactggaataataattctagccttttgattttttgtgaggattaattgaaagaatgtaatttgtaaacagttaacaatggggttattattaatgataaaatcaatcacaaagagttggactgtgtccctgaaagccagctactcatgggggacggaattgtgaatttagcccacgtccttcctctacgtacatgggttgagtcccaaacagcagtggccccagcccatctttctgatcctggagtggtacctgcagctctagagtctcccagagctccctctatatatacgtatttcttttcaagacggagttttgctcttgttgcccaggcccgagtgcaatggcacaatctcggctcactgcaacctccccctcctgggttcaagcgattctcctgcctcagcctcccgagtagctgggattacaggtgcctgctaccatgcaaggctaattttttgtctgtgtgtttttagtagagacaaggtttcgccatgttggccaggctggtcttgaactcctgacctcaggtgatccgcccgcctcggcctcccaaagtgctgggattataggcgtgagccaccacgtccggccttgatatttgagactgttaggactctgactttgttctttttttttgagtcagagtctcgctctgtctcccaggctggagtgcagtggtgcgatcttggctcactgcaatctccacctcctgggttcaagcgattctcctgcctcagcctcccgagtagctggtattacagtcacctgccaccatgcctggctaatttttatatttttagcagagacagggtttcactatgttgtccaggttggtctcaaactcctgacctcgggtgatccacccgcctcagcctcccaaaggactgggattacaggcacccagccaggatgctgacttttattaacagaggccaggaaaagaaaaaaataggcatagctcttggttttgttttttttcattttgcatttttttttagacttcatagcacattatcaaaataatttactgtcacactaatttcttgatttgttccccccccatcattcccaattcctattcttcataggcacacacacaggtatgtttgatatacattcttaaatgaatgtgcattcccataatacgaatggtactatgctacaaattcatttttttctagtgagaactgatttttagatttttcatgtttctctgtgcacagtgctctaatgctgttcatcccttctaacatttgtgtagtaattccttgtgtatatttactacattttacttatctattcctgtagtgatggatgcaactcctggctaccacaaagaatattcttgcagactggaactaggttagactatttgcctggcaattgcctagtgggataaagagtttttcgtacactcaatgttaccaggaacaaccagattgctttctagaatggctgcaactgtttacattctcaccagcagcacctctttctacatccttgcaaacactcgttctttaatgtgttcatttgcattattaaggactactggtgaattagagcacatctctgtatacttgccactcacttggacactctatgaagtgtttattcttaccctgtttatcccttatcaaataatttatcaactccattcataaaagttaagatttagttgaaaatccatctggccttgagactttttttttcccctgaaggaatgtctctatatatgacttcagtttattaggtttattcaagtgtattcattttgttaggttatcaacttttcttacaaatagtcctttataatatttttattattttaacttcatgtttcttatttgcatctttttcgttttcttatttgaatctttgctcattttttgaatatcagccttaaaagaggtttatataacttattgatcattgatcttttcaaaaccctgtctcagttttgttatccttttctcttacttttttctaattctctattttattgatttctttatctttataatttcttttttgtttcttttagtgtgctgtgttcctcttattccacacttgtaaattgacaatttgatttttatttttgataaatgtatttaaagctgtaattttcctctaagtactacataagctatgtctcacaattttggcgtttaatgttttcattgttattcattttcacatgttttgtaatttatgtattcttttttaattcaaaaggcttggctatctttttctaatgctattgcaggatagtcagatgtttacatttgttctttggaactgaatgaggcttcgcttactgcctcatatgtgatcaattttcataactgtcactttttaaaattattatttatttatttatttatttttgagatggaatcttgctgtgctacccaggctgcagtgcagtggcacgatctcagcttattgcaacttccacctcccaggttcaagcgattctcctgcctcagcctcccgagtagctgggactacaggcgtacgccaccacacccagctaatttttgtacttttggtagagacggggtttcactatgttggccaggatggtctccatctcttgacctcatgatccacccaccttgtcctcccaaagtgctgggattacaggcgtgagccactgtgcctggcctccatatactttaaaaataaatgtgacagctcgggcatggtggctcacgcctgtaatcccagcactttgggaggacgaggtgggtggatcatgaggtcaagagatcgagaccatcctggccaacatagtaaaaccccgtctctaccaaaagaacaaaaattagctaggtgtggtggtgtgcacgtgtagtcccagctactcgggaggctgaggaggagaatcgcttgaacctgggaggtggaagttgcagtgagccgagactgatccactgcactccagcctgggcgacagagcaaggctccatctctaaataaataaataaagtataggtattacaggcttttggggtgtaaattccccgtctgttagctcaagccaaccaactattggatttttctcaatttgataggtagaacatgatttcccagtgtagttttaatttgtttttttcttattatgaatgagtttgcacttcttttctgtgaactctcatgatatttttgcccaattttcaactggactctagcgtttttcttgtatagcagggaaattagcactttatgtgagttgcaaatattttcttccagtttgctatttgtcttttgaatttgtttatggtccttttgccatgaaaaattgataatattatctaatttgccagtttgttcctttaagtcttcttagttttgattcacgtttaaaaaaaggccctctgcatcttgggtgtgttagttcatttggtgctgctataacagaatacctgagatgagtaatttaaaaggaatataaatttattttctcataagtctggagtctgggacgtccaagatcaggatgctggcatctgatgagggccttcttgttgcatcctcacatggcagaaggcagaaggggcaagaaagcaagagagagctcccttcaacctcaaaccctcttataaggcccctaatcccatccatgaggactttgcccttatgacttaattacctcttaaaggccccacctcttaatactgtaacattggagataagattttaacctatgaattttggaggggacatacacattcaaaccatagcattccacctgtagcaccccccacctcccaaaattttgtttttctcacatgaaaaatacattaattctatcttaatagcccccaaatcttattccagcatcatctcaaaagtctaaggtccagagtctcatccaaatcagatctaggtgagactcaaggcatggtgcattttgagggaaatctacctccagtgtaagcctatgaaatcaaacaagttttgtgctttcaaaatacaatgacatagagtagacattttgattccaaaggagaaataggaaagaagaaagatgtaacaggtctcaatgaagtccaaaacacaaaagggcaaacagtattgaatctttaggcttgagaataatctttgacttcatgtcctactttccacacactagggaagcagttgggctcccaaatccctgagcagccccacccccacagctttgctgagtgcagcccattcttcagctgtcacatgttgaagttgcgtgcttgcaactttcgcaggctggtgatgcacacgggtggctctacagtttggggtcttgaaggctgccccccatctgcatggctccactaggagttgccatagtggcgactctctgtagtggccctgaggctgtccaagatattctttaaaatctaagtggaggaagccatgcctccacagctcttgcgctgcacacctgcagaattagcaccatgtggccattaccaaagctcaccacttgtgccctctggggcagcaacctgagcaacatcctgggccagcttgagccacagcagaggcagcggagtgctgtgctggaatgcagggagcagagacccgaggcagccctgggcagtgagcctcaaggtaccatgggcaccctggcctctctctcaaaaccgttctgccctcaaaaccctgctattctgggcctttggtgggcatggcaacctcagagatctcaaaaatgtctttggggtcatcctcccactattctgatgaacagaacctggcttccgtctagccatgctaatcttactgaatagccacttggccacacccttggttttcatctaaatacccttttttattctttacatggccaagctgaacatttttcaaatctttatattctgcttcacttttaattataaattgtgtcttcaatttttttctcttttctcacattttactaaaagcaattaagagaagccatgcagctccttcaatacttttcttctgccaaatattctacctagttcattgctattaacttcttccttgatagagccctcagggatggacagaattcagccaagtcttttgctattttgtaacaaagatggcctttccttcaatttccaataagatattcctcatttccatcgatacctcatcagaatagcctttatggtccatatttctaccgacattctgttcatgaccacttaaataatctctaatatgtaggctctctctacagctctcgtcttctgagccctcaccagtatcattcttaatgcttcatttatggcaatataggcttttcctagcctgcttctccaaattcttcccgcctctgcccattacacaattccaacgccccttccacatttttaggtatttttaatagtacaccccacttctctattttagtcttttttgcctccttaacagaataccacagactaggtaaataataaagaacagaaatttatttcttacagttctggagtctgggaaattcaatatcaaggtcctggcatctagtgagagccttcttgctccgtcctcacatggcagaaggcaaaaggggtaagaaagcaaaacagagcttcctttaacctcaactcattttctttttttttctttttttgagacagagtcttgctcttgttgcccaggttggagtgcaatggcacgatcttggctcactgcaacttccacttcctgggttcaagcaattctcctgcctcagcctcctgagtagctgggattacaggtgcccaccaccacgccaggctaatttttgtgttttcagtagagatggggttttgccatgttggccaggctggtcccgaactcctgacctcgtgatctgcctgcctcagcctcccaaagtgctgggattccaggcgtgagccaccgtgcccagccaacctcaagtacttttataagggtcctaatcccatacatggcctcacctcttaatattgtcacattagggattaggttttaacctaggaattttggagggaacacaaacattcaaaccatatccctgagataattttaaaattttcccatgatttcctcctgttatgtttttgctttcatttttttcctttaattttttttgtgtgtacaaatccaactttacccctctacagttacctagtttccaatgatcatttacaaataattcaacatttgccacatatttgaaatgtcacctttaacatatacctaattactacatgtatttgggtacattcatgtatttcctattctgttgcaataatttgttcaagtctactgtctgcttgtttcttgagagaagagttttgaaatctctgctataattatgaatttgtccatttctctttttttgttccatcagtttttgcttcatgtattttggagtttttttgactaaatgcataaacgtttgggattgttatgtactgttaattgatcctattgttacaaaatgacattctttgtccctgttaatattcttagctctcaaatctactttgatagtggtatatctactccagcttagtattttttaatttttcagactgggtcttgctctgtcacccaggctcgagcccagtggtgcaatcacagctcactgcagcctcgacctctgggctcaagtgatcctctcacctcacccttcggagtagctggaaccacaggcacacaccaccatgcctggctaattttttgattttttataaagacgaggtctccctgtgttgccaggctggtcttaaactgggctcctgcctcagcctcccaaagtgttaggtttacaggcgtgagccacagcacctggtctacttcagctttttaaaattagcattagcatggtatatctttttctttttttttgttttgcttttaacctatttatattttaatataaccttatttattataatttaaatatgacctttgtaatttaaatataacctttatagttaaaatgggcatcatatagttgggtgtttttttaattcagcctgaagatctctgtttattgggatgtttagaccatttacacattttatataatttattgagtaaaaatcacataatatgaaagtaatcattttaaagtgaacaattcagtggcatttagtacattcacagtgttgtgcaatagccacttctaattccaaaacacttcgatcattccaaaggaaaacctcttaccaattaagcactttctcccccattctccccttcctctattccctagtaaccactaatctgtgttctttctctatggatttatttattttaggtatttcatataaattgaatcatgcaatatgtaaccttttgtatctactttctttagcataatgttttgcagcttcatccatgttgtggcgttatgcatactccattcttttttatggctgaataatattccattgcatgaattaccacactggtaattttgtctatttggtaactttcatctatttggtaacctggtaactttattcatctgttgatggacatctgggttatttccaccttgtggctattgtaaatagtgctgctatgaacatgtgtgtgcatggtcttgtattcagttcttttgggtatatacctaggggtagaattattaagtcatacggtaattcaatgtttagctttctgaggaactgccaaattgttttctacagtggctgaactattttacattcccaccagcaatgtatcagttttccaatatcttcacatcctcactaacacccagtttcctttttttgattattgccattctagtagatgtgaagtggtaccttattgtggttttcatttacatttcactaatgactaataaggtcaaacatcttttcatatgcttactggtcatttgtatatcttctttggctagatgtctactcatgtcttttacccaaagtctaattttgttgtttgtcttttcattgttgagtcataaagagatcttaatatgtattagataatagacctttatcctatacctaatttgcaaatattttcctccatctttaggctatctttttactgtcttcataatgtcctgtgatgcatcacagtttctaatgtttatgaagtgcagtttaacaaatgagatgtgagcaaaagggatgagtgtaatttctggactgcaaccctagaaagcactgtgcctgcttcctctgccctctcctgccctattggctgggagatgctgagagttttaacatccccctttgccccaaagatggatactactcactatggaaggcagagctatcccaccagccctggactgctcagccctagattcttacacgaggtacaaataaatatatggtattcaggtcattgaatatgtattttggggtctttactatatcagcttaacctatactctaattttacaactccagtgtgccatacaaatagtaccattttctggttgtgccatgatgaaggctgggaagcactatgacctggaccatttgttcttggtcccttttgctgacccttccttctcactgccatcaagagggcaatcctttcctccacaccatccaggtaattagcttatagtggtcccaaagataaaggtcgaataccccagctcttgcagaaaatttgagcatatgttggccataggaagccattgccttgccttgggtagcacctgggataaaggttggtgagccctggtgctggaaatccccaaatatggccccttccaggggcccgacacccatgaaagactgtacttgcatcatgggttgtcctgacatagagttccctctcccttcctagctgggagtcaggagttccacctcctccaaagacagacattttcattgttgttccctcaagtcctcacggtcactttctcctgctctggctggcttgggacaaaactgaacctcccagtttatcttccagcctctgagctccgttatgatacagtgagctgccaaaattaaggtgaactgcagatctaacttctttgcttgtcggtccccttggacatgcatcctcagagcgctcctctcccaggaggagcctcccacccctggggcttcctcacagcagcaccttcgagctgaggtggtgggcaggagctccttggaaccctcccttcctccatccgaagagcttgttcctttccacctctgacttcggtgtcctctgctcctcctctcccggcatcgccccttccctgtgcaggggcagcgattggggcctcagccttagttcttccagctggaccctgggatggtgcggggctgtggctctgggaagtatcttggcctgcacgcggtttacatcattgggagcacaggcctcgccctccgaactacgaggcccagagcccttcgcgccgagcgtttcccgcctttcccctgtctcaagtcattgcccagaggccactgcgggccgttcctgcctgtccgtggagctgcggcccccgtgttcccagggtgaacgagcacgtgcgaggcggtggtgcttgtatccgggataaccaggtagggcggctgcatgcttcatagaggccagcctgtgccgaccgggagctgtaggacggtctgtgtctggggctgcttatgggtattcgcgtgcgtctgccggtgcgcggtccgagcctactcacgagagcgtgtgtgtgtcttctgtctcgtgttgctatgaggtttgcatctgtgtggctggaatagcttgtttgtgggggcccgcgcgtgacctgtgtgtgcgttactgtgtgtgtctcaggcaggatagtgacgggccgtgtgactgtgacgccatcatcaggttggtgagatggcgtgaccgcgtgctgcctatcagtctcctgtatgttcctccaccatctatcttgatattcagcctgtgatagtctttggtcagcttccatgcctgggaggcttttttggccagccacgcccggctgttaaattgtgacaaagtggtataaagcactgcttgcacagggtcatggattaaaagggtaacgtctgggccaggcgcggtggctcacgcctgtaatcccatcactttaggaggccgaggcaggcggatcacgaggtcaagagtttgagaccagcatggccaacatgctgaaaccccgtctctactaagaatacaaaaattagccgggcgtggtgtcgggcgcctgtagtcccagctacttgggaggctgaggcaggagaatggcgtgaacccaggaggcggagcttgcagtgagccgagatcgcgccactgcactccagcctgggggacagagcaagactctgtcccggaaaaaaagaaaaaaaaaaggtaacgtcttccaacaagggatgtggtattacttttgctggatcacatgtcttatctacctttttggagataatttgtatgtaagtaacacatacataagtattatttctttttacaataggccaccttgtattatttttaacctctccctcatagcatcactccctctgttcctctcttcctgcagaggtaactactataatggattagaaaagtatccttcccgtatatttccttagaattttagtgcatatatccctaaacaatattttctggatttcattaatgccgaagtgtaaattttaacattcggatatcagaatacatcttacggttgctaaagtgtcgtattttaatgatgtatttcttacttgcacatgaaataatagtgtgtcaataattgataacatcttagcatccttgaaatatagtattactgttttgcctgattttgaaatgtatttaagtattatataatatatattcttctacagcttgctttttaccttcaacatatttgtgcaatttatttgtgcttgatatttatagctttgtttataaaacaatggtaattgttttataaataatctattttcattctcctgttggtagatactacagtgtcgctataacactgctgttaatgtgtgaaagaggttttattggttcatacctagaagtgaattttttgggagttggcggtatagttgtcctcagcctcactaatattgttagttaacattcccactattaatgtatgagttcatttttccatttgattctttccttcaccaatccctattgtcaggtgttttttccaaagactaatttttttagagcaattttaggttcacaacaaaattaggcagaaagtacagagattttccatatgccttcccccaaaacctggatggcctcccccattctcaacacctcccatcagtgtggtatatttgttataactgatgaatctacattgatacattgttatcactcaaagtccatagggttcactgttggtgttgtacagtccatacagcataaacctgtagcatagaagttttggcatgctccctggggcgaaccacaagtcaaagggtgaagtgggagagggaagaaaaaactgaacctgtcataatccctatcactcagtgtttttaagataatcctttccccaaattgtactttcatctacacaaaactatgcagggtcaattcatgagactcaccacttgctctacagtatgatttccaatcttttagtcaaaggaagcacaggtctctgagtctgttgaagagattcaaatcctaaacacaactcagcctggttgtggccctggtcattttaatttttatattctgtctctcttaaatagagacaaggtctctccctctcttttattttatatatatatgtatacatatttttattatactttaagttttagggtacatgtgcacaacgtgcaggtttgttacatatgtatacatgtgccatgttggtgtgctgcacccattaactcatcatttagcattaggtatacctcctaatgctatccctcccctctccccccaccccacaacagtccccggtgtgtgatgttccccttcctgtgtatgttacatatgtatacatgtgccatgttggtgtgctgcacccattaactcatcatttatattaggtatatctcccaatgctatccctcccccatccccccaccccacaacaggccccagtgtgtgatgttcccctgcctgtgtccaagtgttctcgtcgttcaagtctcacctatgagtgagaacatgcagtgtttggttttttgtccttgcgatagtttgctgagaatgatggttttcagcttcatccatgtccctacaaaggacatgaactcatttttaatggctgcatagtattccatggtgtatatgtgccacattttcttaatccagtctatcattgttggacatttgggttgcttccaagtctttgctattgtgagtagtgccgcaataaacatatgtgtgcatgtgtctttataccagcatgatttatattcctttgggtatatacccagtaatgggatggctgggtcaaatggtatttctagttctagatccctgaggaatcgccacactgtcttctacaatggttgaactagtttacagtcccacaaagagtgtaaaagtgttccaatttctctacatcttctccagcacctgttgtttcctgactttttaatgattgccattctaactggtgtgagatgatatctcattgtggttttgatttgcatttctctgatggccagtgatgatgagcattttttcatgtgtctgttcgctgcataaatgtcttctttggagaagtgtctgttcatatcctttgcccactttttgatggggttgtttttttcttgtaaatttgtttgagttcgttgtagattctggatattagccctttgtcagatgagtagattgcaaaaattttctcccattctgtaggttgtctgttcactctggtggtagtttcttttgctgtgcagaagctctttagtttaattagatcccatttgtcaattttggcttttgttgccattgcttgtggtgttttagacatgaagtccttgcccatgcctatgtcctgaatggtattgactaggttttcttctagggtttttatggttttaggtctaacatttaagtctttaatccatcttctccctctcttttaaatagaaacagggtctcactctcttgtccaggctggagcacagtggcatgaccatagctcactgcagcctcgaactcaaagaactcccagcctctactgatccttccacctcagcctcccaagtagctgcaccaccatgtccagctatttttttttttttttaacttgtagagacagggttgtgacttgttgttcaggctggtcttaaactcctgagctcaagcaatcttcccaccttggcctttcaaagtgctgggaatacgagtgtgagccaccgcgctgggactcatttaattttataaagaacatatattctaccaccctattctactgtcagaattttattaaaattacctgtgttcttttcataccatagattagacctaaaatggattcccacttcaccccctactgctgctttgattcctgtttccctgcacatacagtgggccacacctgcaaaaatcacaaggctgacttcaggaatcagttttgatcttcgctgttgtaccttaaaattttttttaacttttattttagattcagggagtacatgtacaggtttgttacatggatatattgcatgatactgaggtttggggtacaaatgatcctgtcacccagatggtgagcatggtacccactaggtagttttttagcccttaccccactccatccctccccccagtagtccccattgtctattgttcccatctttatgtccatgtgtacccatgtagtacccttattaactgtgttgtggagcttacacatgagaaaggcactttcttggattcgtgtacatggctcaagagaaaatggttagaactgatagagaccctgccaggccggtagctcatgcctgtaatcccagcactttgggagggcgaaggcgggttaatcacttgaggtcgggagtttgagaactgatagagaccttaattacctggtcgctgttttttcaactgggattccaggaaggaatctctggttagatcccacagtattcacaactgatccttcctgctgttgactgatgggagcaaagctccacccagattacctatctcaattaggttctttgaaactcaggccacgttagggataaaaacaatggaattctatctgtacaagtgactgttactctagtatagggcaatcccatttctcctttaaatatcatctcttttttaaaaatttttagagttgggggtacatgtgcaggttacctgggtatattgtgtgatgctgaggtctggggtataaatgaccctgccacccacgtactgagcacgatacccactggttactttttcaatccttgcccccttttatgttttcattgactcttatgttttggtctttgaagattgcttaactgattttctcccagaagtcagctttaaaatcccattccagaagcttactgacaatttataaggccagaaaagtaaaaagcaagcatatagattggaaagaacaaaacataactggccccatttgcagatgatattatttctacatagaaaatctaaaggaatttacaaacaagaatatcacacacacacatccagtgaagcagttaagtttaaatctaatacatttaccggagctaaaaattacaaaacaatgattaaaactgatgaactcaaagaagacctacataagacacatactgtgtttatggagtggaaggcttagtatagtaaagacttccattcttccacaatgaaataaaggcttaatgcaatttctatgaaaatttaagcagggcttttgaaaacacagacaggctgatccaaaatttatatggaagagcaaagaaagtggaatagataaataaattttgaaaatgaataataggtcaggtgtggtggctcacgcctgtaattccagcattttgggagaccaaggccagaggattccttgaactcaagagtttgagaccagcctgggcaacatggcaaaaccatctctactcaaaatacaaaaattagctgagtgtgctgacacacacgtctagtctcagctacttggcttggagaatcatctgattctgcagtgagctatgactagaaccattgcactccagcctgggtgacaggagtgagaccctgcctcaaaaaaaaaaaagaaaaagaaaaagtaaaaaaatgagagcaatcagtatacagctatagtaatcaagacagtgtggcattgatagagggatagatgcatagatttttggaaaagagcattcagaaacacagaagtaggccaagcaattcaatggagaaacaatattttttttcaacaaatagcactgtaacaagtagacatccaaaaaatgaaccttgacctaaattttattccttataaaaagttaactcaaaatgtatcatagactaattttcacattcagctttaaaatttttgtgtctgcaataaactgaaaacaaaactatttttagaatgcaagtaactgacaaaggatttgtgtccagaatatattgtaacacacacaaaaaagaaaaaaatccattatgaaaaaactatagagatagagaatagactagtaattgccaggggttagggatggggagtgaggaggacaggaagatgggtgtgactataaatggatagaacaagggacctttgtggtgctgtcagttttatagattgactatggggagtggcagttacactaatctgtgcatgagataaaactgtatagaactgtacagacacatacacaagtgcctataaaactggtaatgtttgtggattgtaccaatgtcaaatttgattctgtactgttatataaggtgttaccattaggagaaacgaggtgtggggtacaaggactaaatagtactatacagcattatctgtataacttcctataaatccataattgtttccaagaaaaacatttttgaagttccagtagaaaaaaacagacttaatatatgaatagactattcacagaaaatgaaattggaggcaacatatttgtttttttgtttgttttttgagatggagtctcactctgttgcccaggctggaatgcagtggcgtgatctcagctcactgcaacctctgcctcctgggttcaagcaattctcgtgcttcagcctcccaagtagctgggataagaggcacacacaaccacacccagctaatttttgtatttttagttgagacggggttacaccatgttggccaggctgctcacaaactcctgacctcaagtgatccacctgcctcagcctcccaaagtgctgggattacaggtgtgagccaccactgcacctggccacgacataaatatttgaaaggcctgaatataaaacatctgtggaacagaatgaagtgaatttttcacatccactgggcccttacctggcatacataaaatcaccagcatctgcatccccatttattgatccagaaacaaagaaaagctttgttgagatatatagaaattgcttctactctaacaccaataactattcttggcttgatatattagaatgtaaactatattttacagtatgcatgaatggtctctttccttcactccaaaaccaacccaaatgaaggtggatttctttccccaaatggatagccaattatcccaataataaaataattgttttgtttctatactcaactagaaaaaaatttgagtttaaaattaaaaattggcctcaaataaatgcgaaaatactgctgattttattattccaattaacatgaagagacagtaaacaaaataataccttgtcaggtatgttttgtgtaaagacaatcttctataaatgttagtatctgatcaagaataaaaatccattttaaaattatttctccaggcccaggtttcccccacccatttgattcttatttttgagaaattaggaaaataaaagcaagaaaaaacaattttaaaaacccatataattaatttggacaaccagatttgtcaccactgtcatatttgctttcactcttttattaaagaaatattacagataaatataacaactcccaccaaacctttcccacatcccaaaaggcaaccaagtcatatatggatccatgaccaatacacagtactgttctttgcaagatcttattaaattatacaaatgttatactgtgttcctttgtgcattttaattttttctctcaatattatatattgtaatctatccatataactataggtagattttgtttctaaattctgtattttatcacagaaatgatcacacttattcatctattccacaattgataaaaatttgttatatccaattttgggcaatacaaaccatgattcaggaacacagtgatatatatctctttgtgtacatttgtgggtgcctgtgaggccaatacaccaaaattcaacagactattccatgtttacatgttttttaaagaaatcttgttaccctaaagtaacggattctactttcatcatagttttaaaattttgctttttatattctggtctttagttggattttatttttgtatatgatataaagtagaaagctaaaatttttctcctatgaaccttccatttattaaataagccattcattccccagtgatttcaatagcactgtcatacacagaattcctgtatcttcttggatttttgtatgaatgctcactatcttactactgcttgatttattcacttggtaatacattgtttaaatgacagcagctttaaataagtacatgatatatctaataatagagtgtgtcttctctacttgctttgtcaagtttgtttcagctatttgtgtttctttacttttccacataaaatttttggataagtttgtgaagttccttaaaataaaactgatgtaaacttcagaagtatattaaacttagtgatttgggagagaaattatatttttacaatgtcaagtcttttcagacaaaatatcatttttcaggtgttcttttgtgcctttcaacatattttataacttgataaagacctaactcattgttgtgtttattcttaggttttctatcaacacattttctaattatttcttgtataaaagttatttttatagttcttcgttgatacttgttttccttacttaatacattggctaggagctcaagtgttgtgttgttatgctgatggaagataccttgtttcagatttcaatgagaatgctgattaaatattatcaataagatgtctgctgaaagtttctggtaacagctttttcattatataatttgtcaccttggaagaattctctaatgtttcataaatttgtggctttttcagaaggctatcccacattcatagttttctactctggaagtgatcatgtaatgtgcaatgaggtgttaattccttcagatggccttgccatattcacaatattcatagggtttctaatgagtatgaattctctggtgtctaacaaggtgcgacttttggctgaaagccttgccacactcaatacagtgatagggcttctcacctgtatgttttctcatatgaagggtaagagatgagatttgagagaaggcttttccacatttactacagtcgaagggtttctcacctgtatgtcctcgtatatgtatagtaagggatgagctttgggagaaggcttttccacatttattacattcatagggtttttcacctgtatggcctctcatgtgcacaataagggaagttctttgagagaaggctttcccacattcattacatacatagggcttctcacctgtgtgacttctcatatgtaaattaagcagtgagcactgagagaaggctttaccacatttatcacattcataaggcttttcccctgtatgacttctcaaatgaagggtaagggatgcaatttgagagaaggctttaccacattcattacaatcataaggtttctctccagtatgaactttttgatgtgtaatgaagttttgcttttggctgaaggctttaccacattcattgcattcatagggtttctctccagaatgaattttttcatgagcaatgagatttgatttctggctaaaggctttcccacattccttacatatatagggtttttccccagtatgaattctctggtgtctaacaagatttgacatctgtataaaagctttcccacattcattacactcataaggtttctctctagtatgaattttctggtgtgtaatgaagtttttcttgtggctgaaggcttttctgcattccttacattcatagggtttctcaccagtgtgacttctcatatgtacagtaagggctgagctttgagagaaggcttttccacactcattacattcatagggtttttcacctgtatgaattctaacatgtataataagcatggaaaactgagagaaggctttaccacatttatcacatttataaggtttttctcctgtatgacttctcatatgaagagcaagggatgcaattcgagggaaggctttaccacattcattacatgcataaggtttctccccagtatgaactttctgatgtgcaatgaggctttgcttctggctgaatgcttttccacactcattacattcataaggtttctctccagtatgaattttttcatgatcaataagatttgatttctggctgaaggacttctcacattccttacatgcatagggcttctctccagtatgaattctttgatgtctaatgagatttgacattttaatgaaagctttaccacattcattacatttgtaagactgctccctactgtgaattttataatgtttaataagtttttccttgtgactgaaggcttttctacagttactacattcatagggcttctctccagtatgaattctcagatgtctgatgaggtccaaagtctgattgaagccttttccacaatgattacacttaaagggggtaatgacaaaatgggatgagctattaccatatgatttcacaggttcattatattcacaatgctcctttctcataaggcatttcacattattatgacagtcaaaattatgttctaaacactttccaaataagtcatactcatagagattgtgtctggaagggaaaaaatcagagttcagaggaaatacatttgcaaatttcttttgacattcattgcctttttcttcagtcagtgttttctggaatttaacttcaacttgtctcaaaagtctgtcctggtttttctgatgctcatcaactccccatatttctcctaaaacagattgcaaataaatatcacttacaaatttttttccaatattgtaatatgaagaacattttgaaaaatatgcaattatgggactgattattggtttaagccctactctcccactattaaaacattttcaactgcatatatctcttatctctgaagttctgagaaggaaattcaggaaaggaaatatgagtagaggcatatatttataaatacaaatagctttgattgctttaaaaaatgatctgatagaaaacaaataggtaaataaataggaaatgcagaatgtacaaatgaagtaagaagaaataatgatagagaaaaaacaaaaacaggaagctaaaaagtataagatcattttgcgggactctattaaaatacatttttataatctaaacacttttctggattgtaaattactaaaactgacactacaagatgcaaaaaacttatctaaaccaatttccataaaatgaaaagaaatatgaaaagtaattccctaaaacaaaaaggaaaaacccagagatccacatgaaaattctaacagattttaaaggacaactcctatgctgtctaaaatgttgtgaaagaaaaaagacaaaaattcctgatgtttttgtgtatgaaacatatattaataccaaaacctgacaaagatgacacaccaaaaaagcaaactatccgatttcatttatgaaaaccattgtaaaaattctatgtaaaacatcaaaatgacccaaaaggaaaaaagtgacccagaagcacattaaatataaaatatatcatatttgagttgagtacattttttccagggatacgtttcgataatagaaagtatattactataaataaattaatgaaaaatgtcaagtaatgacatttgaaaaaatgaaaaaatcaagtaatcatttctgtagatattaagataataaaactcaacatctatttttcatttaaaaatcctttatataaaataggaacaaataacatttaatttgagaataaagtacagtacagcccaaacaccagcactttacttaatggaaaacatccagaagcattcacattaaagtcagaaataagaaaagatgagttgtcaccactcattgcagtactaggtagtacaattaaataagagaaataaatcagaggtatgaaaattaagaggccgggcgcggtggctcatgcctataatcccagcactttgggaggccaaggcgggcggatcgcgaggtcaggagattgagaccatcctggctaacacagtgaaaccccatctctactaaaaatacaaaaaaaaaaaaaaaattagctgggcatggtggcgggcacctctagtctcagctacttgggaggctgaggcaggagaatggcgtgaacctgtgaggtagaggttgcggtgagccaagatcacgccactgcactccagcctgggcgacagagtgagactctgtctcaaaagaaaaaagaaaaagaaaaaaaaaaagaatattaagaaaagagttgcccctcttttcttaattaaaaggcgtgagtgcagtggctcacgcctgtaatcctagcactttgggaggctgaggcaaacagatctcttgagctcaggagttcaagaccagactgagcaacatggcaaaaccccatttctacaaaagatacaaaaattagctgggtgtagtggtgcaagcctatagtcccagctactagggaggctgagatgggaggatcacctaagcctgggaggttaaggttgcagtgagcagagatcaccactgctctctagcctgggggaaagattaagactgtgtgtcaaaacacaaaacaaacaaacaaaaaaacaaaaaaacaaaaaaaaaaaacaggaaaagaaaatgaaaattaacattatttgtcagaaacaaaactgtttacctgaaaaatcaagtcatctgaacaattgtgaaaagtaagaaattcactacatatgaattgatatttatttttaaaaaccttcatatacaaacaactacagtcatccctcattatctattggggactggttccaggacctcccgtggataccaaaatccatggatgctcaatgccttacataaaatgataaaagtattttcttataacttatgtgtatctttctgtatactttaaataatctccagattacttataatactgaatacaatataaatgctatgtaaatcattgttatactataatttaaaatttgtattattttttattgttgtattgttattttttgttgcttttttcccctgaatattttcaatttgtagttgcagaaagcatggatagaaagggctgactatatttagaaattatagaattaaaaactacatttacaatgacaacaaaaagtatgaaaaatatacaaaaataaaaaatgtccaaaaaccatatgaagaaaagtttaaaatgaacacacagacttgaacaaatagaatggtgttatggattgaattgtgttatggattgaactgaagtcctaactcctagtgcctcagaatgaggcttcatttagaaatagggtcattgaagatgaaattagttaagatgaggtcaaactggaataagagaagcccccatgcgatacgactcgtgttcttagaagaagaatgctacatgaagagacaagagacatggaagaaatgccatgtgaagatggagagacagagtagagttatgctgccacaaaccaaggaatgtctggggataccagaagctgaaagaggcaaggaagaatccttccctacaggtttcagagggagtatggccccactgacaccttgattttagatttctggcctccagaactgtgagaatagttattttttttattttttagagacagagtctcactctgtaacccaagctggagtgcagtggtgtgatctaggctcactgcaaccttcgacgctggggttcaaaagattctcctacctcaacctcccaagtagctgggactagaggcgtggttaatttttttgtatttttagtagagatggggtttcaccatgttgccctgggtggtcttaaactcctgagctcagatgatccacccgcctcggcctctcaaagtgctgggattacaggcgtgggccaccacacctggccaattcctgttatttctaagttacccagcttgtggtactttgtttcagcagccctaggaaactaagaaaaaggcattaaagcattttagacaagaaaattcaatggcataaagatgacattcgtaagttaatatatcagtttaaagcggtttcaataaaaatgtttgaaaatagctcaaaggaaaatgatactgggggttgccaccatagaagggaaaaatgtgtaagagaagaattacttttcaacatatatccttttgtactttaaaagttctgttctggccgggtgcgatggcacacgcctgtaatcccagcaggttgaggcatgtggatcatgaagtcaggagttaagagactagcctggccaacatagtgcaacccggtctctactaaaaatacaaaaattagccaggcatggtggcacgtgcctgtagtcccagctactcgggaggctgaggcaggagaatcgcttgaacctgggaggcggaggttgcagtgagccaagatcgcgccactgtactccagcctgggtaacagagtgagactccatctcaaataataataataataataataataataataataaaataaagttctgttctatgagtatgtgtttatatccagtctaaacaaataaaattgttctgaacactgcaataatcaataaaatgagaagaaccaataggaaggttaaaaactggatgacggaattggaacataaaactggagaggcccacctaggttaattgtataggggcaaatatagtgaccatagggaaaagaaatagtaagaagttgaggttaaatatggtataataaatacatgagtttagctcagattctatccaaaagtgcacaaatatggtatcatttaaaaggcataaaccaacgaagacaaagaccataacagacaacaatggatgatagatgtaaacataattttagcagatggaagaagatgaaaggactattatctaacagaagaaccgagaacgctaaaacccatgtgcctgcagacgaagatgtcaaaaagcaagttcctactatataactaaagaaaggctgagaaattagagaagtcatgcaccatgaaaggtgggaatgaacaggggccctaaaaaataacaaaattgaatggaagtctgtaaggcaaacaattgcctgcactgtgcaatgaggtacctatcactcccaagagaagatgggaagactactctctgcttctggagaaatggaaccagatagactctagagtcagggacaccaggcagaagactacagggaacctaaactggctcaaacaaggatatcaagcaaaagtttacgtacttaataaggctgagatgttcagttccctattgctgcttacttccaataggaaaatggaaatttttctcctctctgccagcatctgttattttttgactttttaataatggccattatgactgttgtgagatggtatctcattatggtgatttggatttctctaacaatcagtgatattgaactttctttcataagcttcttggccatatttatgtcttgaaaagtgtctgttcatgtccgtttaatagggctgtttttttcttgtaaatttaagttccttatagatgctggatattaggactgtgtcagatgcatagtttgcaaatattttctcccattctgtaggttgtatgtttactgatagtttacataaatgataatcttgactaaatatattacaacgaatatacaaaaagataataaattaaaatctacaaatcaataattcaaaatagaaacacaggcatacttcagagatactgtgggttcagttccacaccaccacaataaagcatgtcacacaacatttttggtttcccagtgcatataaaagttatgttggctgggtgcggtggctcacgactgtaatcccagcactttgggaggccgaggtgggtgaatcatttgaggtcaggggttcaagaccagcctggccaatatggtgaaaccctgtctctactaaaaattcaaaaaaattagccgggcgtggtggcaggcgcctgtaatcccagctactgggaggctgaggcaggagaatcgtttgaacctgggaggtggaggttgcagtgagccgagatcatgccactgcactccagcctgggtaactaagagagactacgtctcaaaaaaaaaaaatttaatactatatacttagtctattacgtatataacagcatcatgtctaaaaaatgtacaccttaattttaaaatattgcttaaaaatgctaacaatcatctgaaccttcagtgagtcataatctttttgctgataggtgtcttcctcaatctcaatgttgatggctgctgactaatcaaggggggattacagaaagttggggtggctgtagcaatttcttttttcttttctttctttttttttttttttttttttgagacagagtctccctctgtcgcccaggcaagagtgcagaggctagagtgcagtggctcgatctctgctcactgcaacctctgcctcccaggttcaagcgattctcctgcctcagcctcctgagtagctgggattacaggtgtgcgccaccacgccaggctaattttttttgtgtttttagtagagacggggtttcactatgttggccaggctagtctcgaactcctgacctcgtgatctgcccacctcggcctcccaaagtgctcggattacaggtgtgagccactgcgccggccccaatttcttaagataacaatgaagagtcacattgattgacttttctttcacaaaaagtttctctgtggcatgtgatgttgtttgatagtactttacccacagtaggacttctttcaaaactgtagtcactcctctcaaatcctaccactgctttatcaattatatttatggaatattctaaatcattgatttccacaatttgcacagcatcttcaccaggagtagatcctaaagaaatgactttctttgttcacccataagaagtaatccttatccctgcaatcacgagactgcagcaattcagtcacatcttccggctctacttctaattctacttctcttgctagttgcacatctacaattacttcctccactgaagccttgaatccttcaaagtcatccatgagtgtcgaatgaacctctttcaaactcctgttgatattctgatctcctctcctgagtcatgaatattcataatagcacctggaaacataaatcctttccagccagtttttacactttttaatttactttacccagatccatcagaggaatcattacctatggaagctattacattacagaatgtatttcgtaaataataagacttgaaagtcaaaattactgcttgatccatgagctgcagaatggatgttgtattagcaggcatgaaaaccaacactgatctccttgtacatctccattagagctcctgggtgaccaagtgcactgtcaatgagcaatactattttcaaaggaacttttttttctcgtgagcagtaggtatcaacagtgggcttaaaatatttagcaaatcaatgctgtaaacagatgtgctgtcgtccaggctttgttattccatttatagagcacgagcagggtgtatttagcataattcctaagggccctaggattttcagaatgggaaatgaatactggctccaacttaaagtcaccacctgcattagcccataacaggagggtcagtctgtcatttgaaactttgaagccagccactgacttcacctctctagctgtgaaagtcctagatggcatcttcttccaatagaaggctgttgcatctacatcggaacgctattgtttagttagccaccctcatcaataatcttagctagatcttctggataatttactgcagcttccatcggctcttactgctttaccttgtatttttatgttatggagatggctctttccttaaaccttatgaacctacctctgctagcttcaaacttttcttctgcagcttcctcacctctaagccttcatagaattgaagataattaggggcttgtcctggattatgctttggcttaagggaatgctgtggctggtttgatcttctacccagacaactaaaactttctccctatcaacaataaggctattttgctttcttatcatcttatcatttgtgtgtatactgtagtggcacttttttttttttttttttttttttgagacagggtcttgctctgtcacctaggctgggatgcagtagtgtgatctcagctcattgcaacctccacctcttagactcaatcaatcctctcgtctcagcctcccaagcagctgggactacaggcatgcaccattacatccggctaatttctgtatttttagtagagacagggtttcaccatgttgcccagtctggtcttgaactcctgggcccaagcaatccaccggcctcagcctgccaaagtgttaggattacaggcgtgagccaccacacctggccagcactttaaatttacttcaagaacttttcctttgcattcacaacttggcaaacacaaaaggctttgcttttggtctatcttggcttttaacatgctttcttcactaagcttaatcattcctagcttttaatttaaagtgagagatgtgcgactcttcctttcacttgaacacttagaggtcattgtagggttattaattgccctaatttcaatattgttgtgtttcagggaagagagagacccagaaaaagggagagagacgggaatgggtggtcagtagaatagtcagaacacatacaacatttaacatcaattaagtctgccatcttacatggatgaagtttgtggcaccccaaaacaatgacaacagtaacatcaaagatcactgatcacagatccccataacagataataatataatgaaaaggtttgaaatattgcaagaatgtgacacagacacacacagtgagcacatgcttttggaaaaatggtgccaatgggcttgttcgatgcagggctgccacaagccttcaatttataaaaaaatgcaacatttgccaagcacaataaaataaagcataataacatgagatatgcctgtataaatgcatgaggaagaatcattgagaaaacagaaagggtataaaattttaccagcagaaccaaggaaataattggaagagaaaaagaaaaccaccattgaaatgaagaatattatggtgcggggggaatagaactttcaccattagaattacggtacagcaatgtcacactgcaaaacaaggtaatggataagacagacattctgatgcatcactgggtctacaggacatagcacaaacctccaagaatacctctctacccacctatcccacacaaaaaataaacaataggaaaacaagcaactgttagctaaaatcagagaacactacaaataatttcataccaaaacatttgaaaatacagatgaaacaaattttcaaatataatagatgatcctggaatatcaatgtgtggtaactttttacagatacagaggaaattttaatatttatggaagttactttgtcaactctgaaaatttgaagactagaattaagtgggtaatttcatggaaaaatacaacctattatcaaaaactaatgccaaaagacaaaaatatatttacatacacataggatagttataaaaggaaaaatgaaaagagttgtcaaggaaacttccctcagaaatacacaaggtcgaaatagttcaacaggtaacatctaccaaattttctagggagttttaacactaatgctatataaatgctctagagcatgaaggaaagcttccaaattctatttataaaaccagtctaacattgacattaaaaactttaaaagtataaacaattatttaaattcatagcaaacataagaggatgagtcattattgagaaatatctaaacataattgaaccatatacattttaaaaattgtgataatctcctataggaacagattgttttaactacatgaattattttaaaaagtcgaggtggcaaaaaagtacttcaacgaggaataatctctttgggaaaaaaacacaagaaaaacatatgacagatgatgtgccaatcagctcaatatgttaagagttcatacaaattaagaacttgacagaaacaagggcaaaggataccaactgtttattaaaacaaagaaatatagattggaaacatgaaaagatgcttgccttcactcatcataaaggaaatgtaaattcaagctataattagctaccatttttcacctcagtttggcaacgatttttttaaatgctaacagactacactggttgaagttactggtggaaatataaattattacagtctctttggagggcaaaaatgactttataaaattcaaaatacgtgtatatggacatatatatgtatatgtatatatgtatatgtgggtatatatagatgcacacctacattacatacacttgcatatgtacatgacaaatatatcagaaaatgggagctaccaaaaaatcagcactgacttaaaacttttattgaaataaagggtggtagtgattattgaagtatgagagtaaaacctaaaaatacagtgggaagtatgactgtacgacatttcagacatttacaatggaagaaagaagagaaagtaagggactataaatgtcagtaggtttgatttaacaactgcaaattagtgaatgtatgcaaaaagaaaggatcctgtatatgagggtggatggtactcccgaagatgctaataatagaatgaatatcaaagtaagcctggaaacttattaggaaaggttggtatctagcacacaggtaagaaagccaaccagatctctaagttctgaggaaagaaattaagaatggtatctagaaatgacatcttaggtttataaaagagtttgcatcaatggtcacttttgtactacaaaagtgtacatcaggccaggcgcggtggctcacgcctgtaatctcagcactttgggaggctgaggtgggcggatcacttgaggtcaggagttcaagaccagcctggccaacatagtgaaaccccatccctactaaaaataccaaaaagttagccaggcatggtggtgcatgcctatagtcccagctactcgggaggctgaggcatgagaatcgtttgaacccaggagccagaggttgcagtgagccaagattgcaccactgcactccagcctgggtgacagagtgagactctgtctcaaaaaaaaaaaaaaaaaaaaaaaagccgggcatggtggctcatgcctgtaatcccaacactttgggaggccaaggcaggcagatcacgaggtcaggagatcaagaccatcctggctaacatggtgaaaccctgtctttactaaaaatacaaaaaattagcagggtgtggtggcacgtgcctgtagtcccagctatcaggaggctgaggcaggaaaatcacttgaacctgggaggtgggggttgcagtgagccgagatcgcgccactgtactccacagtgacagagtctcactctgtcacacacatacacacacaaaaggtctacatgctttctgaaaatatatatatattttttgagacagggtctcactccgttgcctaggctagagtgcagtgctgtgatcatggcttactgtagcctcaacctcctaggctcaagtgatcctcccacctcagccttccaagcagctgggatcataagcgtatgccaccacacgtggctaatttttttttttttttttttttttgacagagtcttgctctgtcgcccaggctggagtgcagtggcgcaatcttggctcactgcaacctctgcctcccgggttcaagcgattctcctgcctcagcctcccaagtagctgggactacaggcgcgtgtcaccacgccaagctaattttttgtatttttagtagagatggggtttcaccgtgttagccaggatggttgtgatctcctgacctcatgatccgcccacctcggcctcctaaagtgcagggattacaggcgcaagccactgtgccaggcccaatttttcttttctcttttttttttaagagatgaggtctcactatgttgcccaggctggtcccaaactcctggactcaagcaatccttccaccttggcttcccaaagtgctgggactataggtatgaaccactgtgccaacctctgaaaatatctttgaagaatattttagagggatcaaccattcactgattaatcattaataggccctgacctctcctcacctgtctggttcccttccactaaccttgccagtgtctccttaatacttcttcctccatcacccatggttcttcttcttgctccaatttgaaaatcacatcaggtttggtgaacggatagcctgtcaaagggaagttacatagatttgggcatacatactaggaacaaagaaccacccaaaaattgaggctggcccaggaaaaccaggctaaaggacaagaaaatgtggcttcgggggttctgtccccttttgctctgaaaactgcagcatggacattcacatgagcaaaagcatcccaaggccaagctcactctaatatttaaaaggtccatgtatttcagaaacactgggaggaaaaaaaaggtactttctttccagagtttgaattatatagtaaattactcttacctactgtgattaagttgttatagttttctagcatcacattccggtacagttttctctgagcaggatccaatctcttccactcctcctgagtgaagtcgatagccacatctttgaatgttactgttccctgtaacaacacactcccactcaatctgaagtcatccatcttgggtgattgtaaacaaaatatattgaaccttgttctgatattaatcagaggttattaaaaaagcccatcatattagcagcatcctgtcatttatgttcattcactgattagcaagcacatgtctttaatatctaccatgagttaaaggggagattttaggtaccaatttatattgagtgtgaaagaaacataaaaataaaactttaaccaagttaagtggtttgagatctcacaagataccaaaggcaggaaaaaatgaaagcaaggcttagatggaagcagaagcaggggacagaatgataggtgaaatctgtggtatggtgggacatgcaactggagatagccactgatttagcagttggatgtattgttcatgagatcaggagaaatccacattggaaatgaagatttatgggtcatcagcctgtagtatgtgtctgcagccatgaaaatgggatctgattgttcaaatagtttacatgtactggaaaaggggccacagatagaatctcagagacaaccatgaaaaaacacatgccctgatgacaatttgttttttaatggtcagaaatagaattataactgaaactgtgtatttaaaaagctgtagaatggctgggtattacatggctcatgcctgtaatcccagcactttaggagactgagacgtgaaaatcccttgagcccaggagttttgagacgggcctgggcaatgtggcgaaaccgtctgtacaaaaaatacaaaaattagccaggtgtggtggtgtgcatctgtagtcccagctagtcaggaggctgaggtaggaggattgcttgagcccgggaggtggaggttgcagtgagtcgtgattgcaccactacactccagcctgggtggcagagcaaggccctgtctcaaaaaaaaaaagctattgaatgaatttcaaaaaaactggtgaacttcttaaaggcaatgtgatttgaatatagaaatctaatgcactcttcctagttcaaaacagaaatgcccaaacgtatatgaacataagaaaaaatcttaaatagcactcagcctggaaaaaagggagcaatccatatttcctactgtttcaggaatttctaccagaaactaggtgagaaaaaagaaagtctccaatagctcgttcacaatgtatctaagaatttgtttctaggtcctaaaaggaacttatgagcatgaacatccattaacactaagggctcagagaaagctgtggtactgatgggagatcagctcctgaaagcccttcctgctgaaaatcatgatgcttgcaataaacatgttcaagaagcaaaaggcaaagtgtcagaggaaaaaaaccctgaaatccaggggtttttaatatttcccctcatctgggaggaagatccaaataagcctggataaagcatttggtgaggaagtgggactgaggagaaagcatgatgtggaaatctggccctggtataatagtttcaccaattacagggaagaacatgagcacataagaaacacactcttgctgggactacctcagctgcagactttttcctcaggaagttgtattttcttcaggaggtcagatcattaaactagtaaataaattttaaaaatcagcaccaaagattttacaagaaaatcctaattgcccctagctcaagagtgagagaatcccaaaagaaatcattaaaatacatttgaagaaaatacttgggaaaaagaatttagtaaatgcaaaaacagaaacaatttaaagtgaaaaatttagaacttacatatacacaaatctccatatttaaaagctggagctaggcgcggtggctcacgcctgtaattctaccactttgggaagccgaggtgggagaactgcttgaggctagttcaaggccagtctgggcaacatagcaaaacctcatctctacaataaatgaatgaatgaatgaatgaatgaatgaatgccgtgtatggtggtgcgtggctatagtcccagctacttgggaggctgaggtgggaagactgcttaagcctgggagtttgactgcagtgagccatgatctcaccactgcattagagcagcctgggcaatagaacaagaccctgtctcttaaaaaaaaaaaaaaaaaaaaagctgatagtttaagaagaatgaattaggcaaatgtttagtaagtttaaggaagaaaaataaacatcccaaattaggaaaaaacattaaaactaattgatatttaaagtagtatatatctgtggttgaatttttttttttttttttgagatagagtctcgccctgttgcccaggctggagtgcagtgtggcgtgatgttggctctctacaacctccgtctcctggattcaagtgattctcctgcctcagtctcccaaatagctagaactacaggcgtgcgccaccacacccagctaatttttgtattttcagtagagacggtgttcccatgttggccaagctggtctctaactcctaacctcaaatgatctgcctgcctcggcctcccaaagtgctgggattacaggtgtgagccaccacacccagcctgaaatttttaaattcataatgaaatgaataggttaaagggaaacataagcctaagactgatcttaaaaaaaagaagaaaatcccaacagtgcaatactatagcacccactgttattcttctattccaatatttattctgtcttcccaatttctggccaggcacatggtctgctgaaataagtattaatatgtttatatgataatgttctggacagtgagatgaaaggactgcatgcaactgctgataagtgaacataaaggcacgaggtataccatttctcctaagcttctaccttcctgtagactggtaagtcaatgcgacttaccagagtcgagagcaaacagagccatttgagataataaggcagaagccaacaaccaagaatggcagagcaatgaaggagaaagagtttcgttctctgccctttggagctacaggaccagccttgaacttcaatatgagagacaaataaacttatgtcttgtttaagcaaaggttatctgggctttctatcacaggcagtcaagtgtaatactaacagattaatatgttcatgccagatctggccatcctttggcagctatgaagggatggtgctcgaatcctctttaagggaatccactgtgagaagcatagttggcaaacagcctccagctgctccactttcatgctgaggtcatgacaccccaacactgcttccagccacaggctcagcatagtgaggctattaaagtctggactattacacttgatatggttttcctctagtgggaaagctttggtcagcaactcccctttggcctggctgagactttctcacaacttcaggatggtctgagttggcagaaaaaagtattagtaaacttgaagacagatcactaaaaatgatgcaatttgaagaagagacagaaaaaaggatgtagaaaaatgaatacaggctggacacagtggctcacgcctgtaatcccagtgctttgggaggccaaggtgggaggatcacttgaggctaggagttcaagatcagcctgggcaagatgatgagaccctatctctaccaaaaaatttaagaaatcagctaggtgtggtggcacatgcctatagtcctagccactcaggagacattggtgggaggattgatttagcccaagagttcaaggttacagtgagttataattgtgccactgcactccagcctgggtgacagagtgagaccctatctcaaaaaaaaaaaaaagaatatagactcagaaatgtgagctagagcaataagtgcattaacatatgcataatttaagtataagttagagaggagagagaaaaggacagaaaaaatcaaagaaataatggctgaaaacttcccacatttgatgaaaaacattaatgtacatattcaagctcaatgaattccaagtaggataaacgcaacaaggtacacacctaaacacatcatagtcaaaatgttgaaaataaatataaagagaaaatcttgaaaacagcaagggaaaataattcattatcttcaccaaccacaataaaactaatagctgacttctcatcaaacacaatggaggacaaatagcaatgggacaacatattcaaagttctgaaagaaaaaaaaaactatcagagaggaagtagggaaagagggcccaatagaagcctccaccgatcatactccccacaggaacaccaaattgaacaactatccacacaaaaaagcaccttcatcataaccaaaaatcaggtcagcagtcacagtatctggttttaacttcacatcactgaaagaggcactgaggagggtaggaaagacagtcgtgaattgctgatcgtgaattgctaacgccatccctcccctattctccggcagtggccatatggttctgagagagaatctgtgcacccgcaggagggagaccagagtgattgcaggacttttcattggaactcagtggtgccctgtcacagcagaaggcaacaccagggagaacccagttggtgcccacaccagaagtatttggaccagccccagccagtctaggggaattgtccattgtagcagtaggaacctgaattctggcaagcctcaccaccatgggctaaagggctctaggatcctaagtgaacttgaaaggcagtctaggccacaggaattgcaattcctgggcaagtcctggtgctgtgctgggcttggagccagtggactagggggtcatgggacccagtgagacaccagccagggtagccaagggagtgcttgtgccaccctttccctaacccgaggtagtgcagctcgcagctccaggagagaccccttccttccacttgagaagaggagaaggaagagtaaagaggactttgtcttgcaccttggataccagctcagccacagtatgatagggcaccaggcagaggcccccattccatgcgctagctcctggatgcaacttctacacacaccctggaccagaagggaacctgttgccttgagaggaagaactcagtcttcgcagcatttatcacctactgactaaagagcccttgagccctgaacagtcagcagtggtagccaggtagtactcaccatgggccttgggtgagactcagagacatgctggcttcaggtgtgacccagcacatttcccgtgtggtggctacaaggagagactcctgcttgagaaaaggagagggcaaagtatagggaactttggtaccaacttggccacaatggggtacagcaccaagtgggttcttggggtccccaattccaggccttgcctcttgcatggtatttctggacctgccctgggccgaaggggagcttgctgcctgaagggagaatcccaggcctggcaacattcaccacaagctgactgaagagcccttgggcctggaatgaacactggcggtagccaggccatacttgccatgggcctgggtcagtggtagccacggggagaaattcctctgcctgtggaaaggggagggaagagtgggaaggactttgccatgtggcttgggtgccagtccagccaccgtagaataccaagtacattcctaaggtttctgactctaggccctggttcctggatggcatctctggacctgcccgtggctggggggaacttgctactctaaagggaaggaaacaagactggctggctttgccacctgctgactgtagagtgatagggccttcagtgaacacaggtgatagccaggcagtggttactgtgggccttgggtgagactcagtgctgtgctggcttcgtctgacccagcgcagtcccagtggtggtagccacaggggtgcttgtgtcacccctcccctagctccaggcaactcagcacagaaagactctgggagaaagtaagacaacaagagtctctacctggtaatccagagaattcttctggatcttatctaggaccatcaaggtggtacctctatgattctgtaagagccacagtgttaactgggcttggcatgccccctgatgcagatatggttgcagtgaccaaaaacttagatcacaacacccaagtcccttcaaatacctggaaagtcttgccaaaaagggcaggtataaacaagctcagactgctaagactgcaataaatacctaactcttcactgcctagacatcaacaaacattcacaggcattaagaccatctaggaaaacatgacttcaccaaattgaactcagtaccagggaccaatcctggagacacagaaatctgtgacctttcagatagagaattcagaatagctgttttcaggaaactcaatgaaattcaagataacacagagaaagaatttagaatgctatcagataaatttaacaaagagactgaaataattcaaaagaatagagccgaaattctggagctgaaaaatgcaacggacaaactaaagaatgcatcagtctttttttttttttttttttttgagacagagtctctgtaatccaggctggaatgcagtggtgtgatcatggctcactgcagcctcgacctgccaggctcaagtgatcctcctacctcagcctcccaaagagcagggaccacaggtgcatgccaccatacctaactaagtttttaatgtttttgtagagatggtagtctcactacgttgcccaagctggtctcaaactggtctcaaactcctgggctcaagtgatcctcatgctttggcctcccaaaatgctaggattgtaggcatgagccaccacccccagtctgttcagtcactgaacaacagaattgatcaagcagaggaaagaattagtgagcctgaagataggctatttgaaaacacacagtaagaggagacaaaagaaaaatgagtaagaaagaatgaagcatgcctgtaagatctagaaaatagcttcaaatgggcaaatctaacacttattggccttaaagaggaggtagagagacaggggtagaaagtttattcgatgggataacaatagagaacttcccaaacctagagaaagatattgatattcaagtacaagaaggttatagaacaccaagtagatttaaaccaaataagactacttcaagacacttaataatcaaactcctaaaggtcaatgataaagaaaggatccatttaaacacagcaagagaaaagaaacaacataccaatggaagctccaatatgtctggcagcagacttttcagtggaaattttacatgccaggaaagagtggcacgacatatttacagtgctgaaggaaaaaaacttttatgctagaatagtatatctggtgaaaataaccttcaaacatgaaggagaaataaaggctttcccagacaaacaacagctgagagatttcatcaacaccagacctgtcctacaaaaaaatgctaaagagagtccttcaacctgaaaaaaggacgttaatgaacaataagaaatcatgtgaaagtacaaaattcactggtaatagaaagtacacagaaaatgcagaatgttataacactgtaattgtggtgtgtaaactactcatatcttgaatagaaagacgagaagaagggctgggtgcagtggctcacacctgtaatcctaccactttgggaggctgaggtgggcagatcacgaggtcaacagatgagaccattctggccaacactgtgaaacgccatctctactaaaaatacaaaaattagctaggcatggtggcacatgcctgtagtctcagctactcaggaggctgaggcaggagaatcgcttgaacccgggaggcagaggttgcagtgagccgagattgtgccactgcactccagcctggtgacaagagcgagactctgtctcaaaaaaaaaaaaaaaaggaaagatgagaagatgaatcaatataaatacatcaataactaaaacaatgtttcaagacacagtacaataaaatataaataaaaacagcaggttgggcacagtggctcacgcctgtaatcccaaccccttgggaggccgaggcgggcagatcacaaggtcaggagatccagaccatcatggccaacatggtgaaaccctgtctctactaaaaatacaaaaaaattagctgggcgtggagtggcgcaagcctgtagtcccagctactcggtgtcaagcctctgagcccaagctaagccatcatatcccgtgacctgcatgtatacatccagatggcctaaagcaattgaagatccacaaaagaagtgaaaatagccttaactgacgacattccaccattgtgatttgtttctgccccaccctaactgatcaatgtactttgtaatctcccctactcttaagaaggttctttgtaattctccccacccttgagaatgtactttgtgaaatccaccccctgcccgcaaaacattgctcctaactccaccacctatcccaaaacttacaagaactaatgataatcccaccaccctttgctgactctttttggactcagcccgcctgcacccaggtgaaataaacagccttgctgctcacacaaagcctgtttggtggtctcttcacacgtgcgcgtgtgacacttgggaagctgaggcaggagaatcgcttgaacctgggaggcggaggttgcagtgagctgagatcacgccactacgctccagcctggtgacagcgagactccatctcaaaaataaataaataaataaattaaaaagtaaaaacagcaaaaagttaaaaaagcagggggacaaagttaaagtgtagagtactaactttctcttggcctgtttgtttatgcaatcagtgttaatttgtcatcagcttaaagtaatatgttatattatttgcaagcctcatggcaacctcaaatcaaaaaacatacaacagatacataaaaagtaaaatgcaagaaattaaaacataccactagagacaaccaccttcccaaaaaggaagacaggaaggcaggaaaggaggaaaagaagaccacaaaacaacctggaaataacaaaatagcaggactaagtccttacttatcaataataacattgaatgtaaatggactaacatttgaatgtaaagctctccaatcaaaagacagagtggctgaatatattataaaaacaagcaaacaaacaaacaaaaaaacaagacccaaaaatccattgcctacaagaaacacacttcatctataaagacacacatagactgaaaatagatggaaaaatatattcatgcaaatggaaaccaaaaaagagctggactagctatagacaaaatagacttcaagacaaaaactataaaaagagacaaacaaggtcattacatgatgataaaggggtcaattcagcaagaggatataataattgtcaacatgtatgcacccaatgttggagcacccagatacataaagcaaatattattacagtaaaagagagagatagacccaatagaataattgctggagatttcaacattctactttcagcactggacagactatccagatagaaatcaacaaagaactatcagacttaatctgcactacagatcaaatggacataatagatatatacagaccatttcatccaatggctgcagaatgcgcattcttttcctcagcacatagatcactctcaagcatagaccatgttaggccataaaccagtcttaaaacattcaaaaaattaaaattatataagatatcttctctaaccacaatggaataaaactagaaatcaataaggaggaattttggaaactatacaaacacagaaataaaacaacatgctcctgaatgatcactaggtcaatgaagaaattaagaagaaaatttaaaagtttcttgaaataaatgataatggaaacacaacacatcaaagcccatgggatatggcaaaagcagtactaaaaggaaagtttatagctataagcacctacatcaaacaagaagaaaaacttcaaataaacaatttaatgatgcatcttaaaagaactagaaaagagcaaaccaaactcaaaattattagaagaaaataaataataaagatcagagcagaaataaatgaaatgaagaaaatgatacaaaagattaacaaaataaaaaaatcagttttttaaaaaaatgaaatcagcaaacttttagctagactaagaaaaaaagagaagacccaaataagtaaaatcagagatgaaaaaagagacattataaccaatactggagaaattcaaaggatcattagaagctactgtgagcaactatatgccaataaattagaaaacctagaagaaatagataaattcctagaaaatacaacctaccaagattgaaccatgaagaaatccaaaacctgaacagactaatagcaggtaatgagattgaagctgtaataaaaagtctccgagcaaagaaaagctcagaacccaatggcttcactgctgaattttactgaacaattaaagaagaactaataccaatcctaattaaactattccaaataatagaggaagagggaatacttccaaactcattccaggagggcaatattaccctgatacgaaaaccagaccaagacacatcaaaaaaaaaaaaaaaaagaaagctacaggccaatatccttgctgaacattgatgcaaaaatcctcaacaaaatactagcaaactgatttcagcaacacattaaaaagacaatacatcatgaccaagtgggatttatcttagaaatgcaaggacggttaaacatgcgcaaatgaatcaatgtgatatatcagatcaagagaatgaaggacaaaaaccatatgatcatttcaactggtgctgaaaaagcatttgataaaattcaacatcccttccatgataaaaaccctcaaaaactgagtacagaaggaacatacctcaatacaataaaagccatatatgacagactcacagctagtatcataccgaatggggaaaaacagaaagcctttcctttaagatctggaatatgacaagggtgcccactttcaccactgttattcaacatagtactggaaatcctagcaagagaaatcagataagagaaagaagtaaagggcatccaaattaaaaaagaagtcaaattatccttgtttgcatgtgatatgatcttctgtttgaaaaaacctgaagactccagcaaaaaaagtaccagaactgataaacaaattcagtaaagttgcaggatacaaaatcaacatagaaaaatcaatagcatttctatatgccaacagcaaacaatctgacaaaagaaatcaagaaattaatattttcagtagctaaaagtaaaatccctaggagttaaccaaagaattgaaagatctctacaatgaaaattataaagcactgatgaaaaaaattgaagaggacacacacaaaaaaatggaaagatagtccatgctcatgggttggaaggatcaatattgttaaaatgttcatactacctaaagcaatctatagattcaatgcaattgttatcaaaataccaatgacattcttcacagaaataggaaaaaatgctaaaatttatatgcaaccacaaaagacccagaataggcaaagccatcctgagcaaacagaaaaaactggaggagcctgacttcaaattatactacaaaactacagtaaccaaaatagcatggtactgacataaaagtagacacataggccaggaagggtggcttgtgcctgtaatcccagcactttgggaggctgaggtgggagaactgcttgagcctgggagtttgagtcctgggcaacatagtgagaccttgtctctacaaaaaaataaaaaattaggcatggtggtgtgcacctgtggtacttgggaagctgaggcaagaggattacctaagcccaggaggtcaaggctacagcaagccatgttcacacctctgcactccagcctgagcaagagagcaagatcctgtcacaaacagcgacaacaaagaataacaacaagcagacacaaagaccaatggaacagaacagagaacccagaaacaaatccatacatctccagcgaactcattttcaacagcggtgccgagaaatatattggggaaagaacagtgtcttcaataactggatatccatatgcagaaaaatgaaaccagacccctatctcttgccatacacaaaaatcaaatcaaaatggattaaagacttaaatctaagacctcaaactatgaaacgactaaaagaaaacagaggaaattctctaggataatggactgggcaaaggttccttgagtaatatcccgtaagcacaggtagccaaagcaaaaatggacaaatgggatcatatcaagttaaaaagcttctgtacagcaagggaaacaatcaacaaagtgaagaggcaacccacaaaatgggagaaaatatatgtaaactatccatcagacaggggattaataactagaatatataaggagctcaaataactgtatatgaaaaaagtctaataacttgatttaaaaagggggaaagatctgaagacatttctcaaaggacatacaaatggcaaagaggtatatgaaaaggtgttcaacatcactgatcatcagataaatgcaaatcaaaactacagtgagatatcatctcaccccaattaaaatggttttttttgtttgtttgtgatggagtttcgctcttgttgcccaggctggagtgcagtggtgcgatcttggctcactgaaacctccgcctcccgggttcaagcgattctcctgcctcagcctcctgagtagctgggatttgaggtgtgcaccaccatgcctggctcattttcgtattcttagtagagacggggtttcaccatgttgaccaggctggtcttgaactcctgacctcagatgatccacccgccttggcctcccaaagtggtgggattacaggcatgagtcaccatgcccggccttagaatggctttcatccaaaagacaggtactaacaaatactggccaggatgtggagaaaagggaaccctcatacactgttggtgggaatgtaaattagtacaacctgatggaaaacagtttggaagttcatcaaaaaagtaaaatagaactatgatataatccagcaatcccactgctaagtatatacccaaaagaaaggaaatcagtgtattaaagagatatctgtactcccttatttattgcttccttgtttattcacaatagccaagatttggaatcaagctaagtgcccatcaggaaatgcatggataaagaaaatgtgatacatacacaccttggagtactattcagccataaaaaagaagagcctatcatttgcaacaacatggatgcaactggagatcattacgttaagtgaaataagctagacacagaacgacaaagctcacatgttctcacttatttatgagagctaaaaattaaaacaacggaactcatggaaatagagcacagaatgatggttaccagcagctaggaaggatagtgggtgggggaaatggggatggttaatgggtacaaatatagttagaatgaataagatctaatatttgatagtgcaacaggacaactatagtcaacaataatttgtacatttaaaaataaccaaaagagtaaattggattgtttgtaacacaaaggataaatgcttggatagataccctatttaccctgatgtgattattactcattgtatgcctgtatcaaaatacctcatgtacctcataaatgtatacctcatacatgtatacacctactacgtatccacaaaaactaaaaattaaaaaaactaacaacaaagaatcctatatttaggaaacttatctttcaaaaatgaaggtgattatgttaggtgaaagaagccagacacaaaaggtcacatattttattattgtatatatatgaaatattcagaatagataatatagccagaataggtaaatccacagagacagaatgcagaatggtgtttgccaggggctaggagtgagagagggataggggaacagatgcttaatgggtatggggttttattttgaggtgataaaaatgttacagaaccagatagaggtggtggctatacaacactgtgaatgtactaaagaccactgaatcgtagaatgattaattttaaatatgtatgtgaatttcaggtaaaaaaataaggtgaaataagtaaaaacaaagaattcaatgctagcagactagcctcataagaaacacggaaggaagttattcagactgaaaggaagtaacaaaaaacaattaaaatccacatgaaaaaatgaagagctccaataaagcactaagcagaatgcagagcacacaatgataagtatatatcagctgaactaatttcattttcttaggtactctgccctacatttctggagaagtgaaccttttatttgtagatgaagacttaatatggcaacaaaagaacaaataaatgtgatatccttcctctatgggctaattttcttctttatcaatgcgctttatcaccaagaatatcttgagaccttccatggccttattttatactaccttggcctctactcagcactcactggctccaaacacgtttaaccagtatactagttttgaagtacattttaatctatgtttccttatgcctcatacattttctccacttaactttattgaaaaaggaaagacagaggagaagatgaaaggggaaaatcctctccttcctcttacaggcctggaatagaggaaacaaaggccttgaaggtagggaggtaatatgtgcctagaactccccacactctaaggcatgagtgtgaaatgcaagagaagcagtgagttaagtgggaaaagtgtcatgtcaaactgagagaataacttctaagtagctttcagttcccatgtagcacagaccctgagtaggatgaagtagggtcatttcagaaggcaaggtgaggctgggcatagtggctcatgcctgtaatcccaacactttgggaggccgagaggcaggaggattgcctgagcccaggagttcgagatcagcctgggcaacatagtgggaccttgtctctacaaattgtttttttaaattagccaggcatgggggcacgtgcctgtactcccagctacttgggtagctgaaggcgggaggattgcttgagcccagcaggcagaggttgcagcgagctgagattgtgccacgccagcctgggtgacagagtaagaccctgtttcaaaaaaaaaaaaagaaggcaagatgctcctacatgcatgctgtggggtttaggggacccaggaagcatctagagaatgacagattcagagagatctacagagatagcaagaaccaaaggaggccagttgataaagagaggtccttggaccatcactgagctgtgaaatacaccataaattcatcagccactgaatgtcctgaaaaaggagctagctaaatcatccagcatatacccaagctatgaagatcttccctgttatctcaaacaccactttaacagagaacagggatacaaagtagaatctgaatgactaaataattgtcaagagaacaatttgctgattgaactaagttttgaatcagactgcattaaaattagttttttcattttatcaatcagaactcacaggggatagcagagtgagtttagaaacactctgggcctcttggagcttagattctactttggggacagggaaatgaaaacataagcaagtgaataagtgagataaaatgtgatattgataagttaagaaaatgcaataaaggtaatgggttatggaatgaatcagaaactctactttgaatttagtaaccaaagacaaccttgaggaagatgacatttcagcagaaacctgaatgatgagaaagaaccagtcatataaatatctagggtaggaacatttaaaagcatgttcagagttcttggggcaagacaaagttggtctgctcaaagcggggaaaggttagtgagggtgaaacacagtgaatgagggagaatgtagcacaagataatggtgaagacatgggcagaaggcataccaagaggggctttgtaagggacgttattccacatgtaaaggaaagacactagatggtattaagcagagaagtcataataaaaccttaggtttaaattatcactttggttgttctatggagaatggactatagatggtcaggagtggatacagggagattagtaggcagttgccagagtagttccaggtaagaaatgaagtgacatggattataagatccatggaaatgttgatcagagaatataataatattcagcaatgagattaactgaactacaactagatgcaccaatttaacatggatgaatctcacaaacataatattaaacaaaagccagacacagaatacacagattatataaagttaaaagacaggaagaaacaatttatggtgataaaagttgaacactcctggggtgggggtgatgactaggaagtatagaaaaggtatcctagagtgctagggtaattctgtatttcttcactgagtgtgtgcgctgtgttacacaggtatgttcattttgaaaattaactgagtgtgcctgaggaagaaactggagatatatagaagctggcagataaaaatacatggtcggccgggtgctgaggctcacgcctgtaatcccagcctttgtgaggcgggcagataacccgaggtcaggagttggagaccagcctggccaacagggtgaaaccctgtctctactaaaaacacaaaattagctgggcatggtggcgcacgcctgtaatcccacctactcgggaggctgaggcaggagaattgcttgaacctgggaggcagaggttgcagtgagccaagatcgcatcactgcactccaccctgggcaaaaagtgagactccaaaacacaaaaaacaaacaaaaaaaaccacggtcaaagaaaggtatatctcagaagagcaaagctttgagctgagggtaaaaagtaaaatatgttcagtatctgagagtgtaggataaatctgaaagaaaaccacaagtattcacagaatatcaagtgtactaggtgatcttctaggtactggagatacagcagtaaacaaagtaaaacacactctctgcttacattctagtggttaaaattttaagaatttaccagaaatgattacagtgtggctcaatcagcagcaaatgcccattgaaaaagataattacatagggtcatctgaaagacacacatcccacctctttcttaagatagtctagttttctctctttaaatttacgggccgggcgcagtggctcacacctataatcccagcactgtgggaggtcaaggcaggtggatcacttgaggtcaagagcttgagaccaacctggccaacatggtgaaatcccatctgtactaaaaatacaaaaaaaaaaaaaaaattagccaggcgtgctggtgggtgcctataatcccagctacaatggaggctgaggcaagagaatcacttgaacccgggaggcagaggttgcagtgagctgagatcgtgccattgcactccagcttgggcaacagagcaagactccatctcaaaaaataaataaataagtaaataaataaataaatttatgtatgacatgcatagagtaatgtggtaaaatggactagtcttaagcataaaatctgataaatctgtatacatttatagacatgggtacctaccagtaagtcaaaatacagaacattttcacccctccagatttcttcatgctgtttcacagtaaataccctctcagaggtaaccagtattctgacttctatcacaatacattagttttgcccattttcaactttatatgaatggaaccctatgatatatacttttttgtttctggcttctttcattctatgtttgtgtaatctatccatgttggttgttgcgtgtaacagtcatctgttcttttttattgttaagtagtatttcaccgtgtgaaatactataatttattccttttcctgttaattttcatttgcattgtttctaatgctgggctattttgatagttacactttgttttatccttgatcgaaagagaacatcaaaagagctaggtttatcaactacaagaagtaacactacaatgttttcattgacctaggtatcaatgaaaagcttatttctgttagaaaatgttgattttttattgttacaatgaaaattatgtaacaaatttttgctctggttttctttacctgtaaaaaggaaatttaaatttgaagcccagctttaatctctctgaatgaatttcataaaatacccacattttaactcttccctagttttaatcgttcaactctatttcccctgaaaatatgttttatgtatacagacctttataatttactgtatgaattactgcaatccccttaaattgcattggagagtaaggcaagaaacaaatacactatttaacatttacctgggactcagtcatttcctcttctttctgggaagggatggggcctgcagaagtagagctggggaagagaataaaagtcattaaaataggcctgtctttagtttcagaaacatgcacacacagggtggattaaaggtcaccctgtagtggaatgataattaaatctatcagaaatgccaagaatattcataccacaaaggttcttaataggtgtgaggatgattggaataatcatgcagagcttgggcacagggtggatagaaacaggggtgcgtatgtgggagctctgtatcagagaatacatgtagcatcatgaaagcatatatgcaggaaaattatgaaactgacaaaacacctaaagtattttaaagtattgagacatttaagacagtcataattagcaattaaaaaagaagtagcaatttaaaagaatttaaaaggtgatatatcttgaggaacaaataaaaagtttttatgtgtgagtaatgtgtatcggaggtactgatggtaagagagttaaatccgtacttttccctagccagagcaatcagacaagagaaagaaataaaaggcatccaaattggtaaagaggaagtcatactgttgctgctgctgatgacatgattgtatacctggaaaaccctaaagattcatcccaaaagctcctagaactggcaattgaattcagcagtttcaggacacaaaattaatgtacacaaatcagtagccctgctatatgccaacagcaaccaagctgagaatcaaatcaagaactcagccccttttacaatagctgccaaaaaaaataaaatgcttagcaatgtacttgaccaaggaggtaaaagatctctataaggaaaactacaaaacattgctgaaagaaatcacagataacacaaacaaatggaaacacatcccgtgctcatggatgggtataatcaatattgtgaaaatgaccatattgccaaaagcaatctacaaatttgatgcaattcccatcaaggtaccaccatcattctacacagaactagaaaaaaaaacaatcctaaaaatcatatggaaccaaaaaagagcccacatagccaaagcaagactaagcaaaaagaacaaatctggaggcattacattatctgacttcaaactatattataagaccacagtcaccaaaacagcatggtactggtataaaaacaggcatatagaccaatggaacagaatagaaaacctagaaataaagccaaatacttacagtcaacatatctttgacaaaacaaacaaaaacataaagtggggaaaggaaaccctatttaacaaatggtgctgggataattggcaagccatatgtagaagaatgaaactggggccaggtgtggtggctcacccctgtaatcccattactttgggaggccaaggtgggcggatcacgaggtcaggagattgagaccatcctggctaacacagtgaaaccccgtctctactaaaaatacaaaaaaattatccaggcatggtggcaggtgcctgtaatcccagctacttgggaggctgaggcaggagaatggcgtgaacctgagaggcggaggttgcagtgaaccaatatcacaccactgcactccagcctgggcaacagagcgcgactccatctcaaaaaaaaaaaaaaaaaaaagaatgaaactggatccttatctctcaccttatacaaaaatcaactcaagatggatcaaagacttaaatctaagacctgaaaccataaaaattctaaaagataacattcgaaaaacccttgtagacattggcttaggcaaaaacttcatgaccaagaaccgaaaagcaaacacaacaaaaacaaagataaacagatgggacttaattgaactaaaaagcttctgcacagcaaaataatcagcaaagtaaacaacccacagaatgggagaaaatcttcacaatctatacatccaaaaaaggactaatactcagaatctacaaggaactcaaacaaatcagcaagaaaaaaacaatcccatcaaaaagtgggctaggacatgaatagacaattctcgaaagaagatatacaaatggccaacgaacgtatgaaaaaatactcaacatcactaattattagggaaacgcaaaccataaccaccatatgatacttcactcctgcaagaatagccataatcaaaaaataataaatgttggcatggatgtggtgaaaagggaacacttttatactgtcggtaggaatgtaaactagtacaaccactatggaaaacagtgtgaagattccttaaagaactaaaagtatatctgccatttgatccagcaatcccactcctgggtatttatccagaggaaaagaagtcattacaggaaaaagatacttgcacatgcatgtttatagcagcacaattcgcaattgcaaaaatatggaaccagcctatatataaaaaggaacaaaataaaggcataaaaacagagtgaattttactgtatacaaatagaattcaaccaggatgtgaattctgggaggtggaatctaaaatagaatgtagaatatgacacattaatttaactgtactacagaagaggtttatggtagattctttggcattttctacttaattatgttgtctgcaaatagaaacagttatattccttccttttcaatctttatgtcttttatgtacttttcccttattgcactggctaggaattccagtacaatagtgactattataatagtagtaagagaggacatccttgcattgttcccagtcttagagataaagcattcagtatctcaccattaactgtaatgtagctctaggttttttgaagatgccctttagtaaaggttgttcccttcaattcctagtttgctgaggagttgctttgttttttgttgttaacatgaatgaatgtttgtcaagtgcttttctgcatctactaacagtcatatgtttattctcttattacagtcaactgtagtaattgattttcaaaggatgaactggaaattcatctcatattcccaagatgaaccctattgtgatatacttttttcatattgctagattcaattcacccatattctgttgaggatttttgtttctaactccatgaggaatactagtctgtagttttcttgtaatatctttggctttggtatctgggcaaagctggcctcataaaatcagatgaaaagtcttcctcctcttctatattctggaaaagtttgtatagaatcattagaatttcttccgtagatgtttagtacttcacctgggaaattatctgggtgtggagtttccattttggaaggtttttaatcacaaattcaatttcattaatagatatacaactattcaggttatttcttattgtctgaattttggtagtttatgtctttcaaaaaatttactcattcatccaagttgtcaaattcgcaggtatggagttgtttgcagtattcttttattatccttttcaaatctgtgggggtgagtgtgacaccctatctttcattcctgatattatcagcaatttgtttctttttttcaacttttattgatcttttcaaagaacaagcctttagttcactgatttttctccattatttttggtttcaaattgtcctgaattatgctgtaatctttttttttttttttttttttttttgagacggagtctggccctgtcgcccaggctggagtgcagtgttgtggtctcagctcaccgcaagctccgcctcccgggttcacgcctttctcctgcctcagcctcgcgagtagctgggactaaacgcgcccgcaaccacgcccggctgattttttgtatttttagtagagacggggtttcaccgtgttagccaggatggtctcgatctcctgacctcgtgatccacccacctcagcctcccaaagagccaccgcatccggcctatgctgtaatctttaatatccgtttccttttgtttgctttgagtttagtttgcttgtttcccctctagtttgttaaggcagaagtgtagtaatgatttttctaattatttatatcatgtaatgcaacaaacttccctgtatgcactaatttagctgcttcccacatattttggtgtgctgtatttccattttctttcgaattattttttaatttcctataatgtttcttgactcatggactatttagaagtgtgtttcattttgaaatatttggagattttccagatacctttctgttctttacttctagttttattctgctatgttctgagaacagactttgaatgacttttatgtctttaaaattcttgacatttctattatggccccaaatatgatctatgtaggtgaatgcccatgcgcacttgaggaagacatgtattctgctgttgtttagaatgttctataaatgtcactcacatttgaacaccgaaaaaattgacattcaatacatgaatgttggttgataatgccgttttggagtcttctgtaacctttctgatatcctttcacgctctatcgattcctgaaagagaagttttaagtccccaactataattgtgcgtgtgtctatttctcctttcagttctatcagtttttgcctcgtatatcttgaagctctgttagctgcatacacatttatgattgttgtctcttcttactaaccccttgagcattatgtttcttcatccctgattaaatcccttgttctaaactttgtctaatattaaagttgcttcctcttttttttttttggttagtattttgtggctttttttaatatcatttgcttttaatatacttatttatctttatatttaaaatgggtatcttaggctactccatcttgtagtctggtagttaaaatgggtttcttgtaaaacagcatttagatgaatcttgctcttttattcaatgtgataagctctatctgtaactggtgcattcagaatgatattaaaattgattactgatacagctggattaagatgtaccatcttcttagctgttttctatttgctcctttgttctttttcgctctccttcccccacttttctcctttggtttcgtttaattgcacactttttattattctgttttatctcccacttagtcattgtggatgacattttaatgtactgttggacatggttttctagtattttgttggggatttttgcatctgtgctcaccaggaatactgccctgcagttttcttgtgtctctgtcttgctttggtatcaggttaatgctggcctcatgagtctggaactggtccctcctcctcaatattctgaaagattttgagaaggatttccattaattcatctttaaatgtttggtagaattcaccagtggagctgtatggtccagagctcttccattaggaggtttttgattcctgattcagtttccacactagttataggtctgttcagacattttataatatttcttcatgatctaatcttggtagttcgtatgtttctaggaatttaattttttattctaggttatccagtttgttgatgtataattgttcacagttttttcttaagatcctttttacttctgtggcatcagttgtattgtctcttctttcaattctgatgttatttatttgagtcttctctatttttttcatagtttagctaacggtttgtcagtttatcttttccaaataccaactgttagtttctgtcacttttctatttaatttatttatgctctcgtttcctttatttcctttcttctgctaactttgggcttagtttgctcttctgattctagttccttgagatgtaaagttagttgtttatttgagatctttcttcttttatcaggtaagagcttatccatatgaatttacctctcagttctgcttttgctgcaacttataagttttggtatgttgtgtttttgtttgcctcaaggtattttctaatttcattttttatttctcgtttgacccaatggttattcaagattatgttcatttcaatatacttctggatttcttggttttccttgttatattgatttctagtttcattctactgtggtcagaaaatatatttggtatgatttagatattttaaaattttttaacatttgttttgtgatctaatatatgatgcattatggagaaatgtccatgtgtactggagaagaatatgtattctacagctgttgggtataaagttgtgtagatggccaggcacggtggctcatgcctgtaatcccagcactttgggaggctgaggcaggcagatcacctgaggtcaggagttcgagaccagcctggataacatgttgaaaccctgtctctgctaaaaatacaaaaattagctgggcatggtggtggacacctgtaatctcagctactcgggaggctgaggcaggagaatcacttgaacccgggaggcggaggttgcagtgagccgagatcgtgccactgcactccagcctgggtgacagagcaagaccccatctgaaaaaaaaaaaaaaaaaaaagttctgtatatgtctctcagatccattaggtctacagtgttattcaagtcaaatgtttccttattgatttgtcaggaagttctgtccattattaatggacagaaagtggggtattaaagtctcctattatattgtattgctgtatatttctcccttcaattttgccagtgtttcttttacatattagatgtcctggtgttgggtgcatatatatttataatcattctatcttcccagtgggttgacctattatcattataaaatgtccttccttgtctcttgtgacagttttttacttaaatcctattttatctgacatatgtatagctaccccgctgtcttttggttaccatttgcatggatcatctttttccatcccgcaccttcagcctatgtgtgccgttaagatctgaagtgagctttttgtagacagcatatagttgggtcttgtttatatatccattcagccactctgtttcttgattggggagtttaatgtgcgtttcctgtaattattgctagggaagaatttactattgctattttgttagttgctttatgttagtcttcttccttcatctcttctctcttgcagtctccctttgtgttttgttagttttttgtattgatatgctttgacttctttctcttttgtgtagcctctatgggtaatttctggcatatgtagttagtttggggcttacataaaatatagatgtaacagtctattttgagctggtaacaaacttaagtttaatcacatacaaaaactcttcattttaaattctcctgcccacatttggttataactgtcacaattcacatctattcacagtgtatcttttaacatatttcatatctatttttaatacttttgtcttttaactttcatagtagaattaaaagttatttacccaccaccattatggtaatgcagtattctgtatttacatatatatttacctctatcaatgagtttcatacttttctatactgtctttttgctgtttggtgttttttcatttctatttgaaaactccctttagcattttttataaggcaggtctagtggtgatgctttggtttgggaaagtctttctctcatcatcatttttaaaggatagttttgccaagtatagtattccgggttggcagagatttttttgttattgttgtttgttttgtctgtttgatctttcagctctttgaatatatcattctactctgttctcgcctgcaaagtttctgctgaaaaaaatcccttaatagtcctatagatgttcccttgtatgtgacaagttgcttttctcttgctgctttcaaaattctgtgtttgacttttgacaatttgctataatgcatcttggtatgggtttgtttcattttattttgtgtcctttgtgcttcctgaatctggatgttcgtttccttccccagctttggggagttttcagccattacttttaaaataagctttctggtcctttttctctattttctcctgagattcccataatgcatatattagtctgcttgatggtattctataacccacttaagccttcttcactctttttcattattttttattatcactcccctgactgaattatttctaatggcttgtcttccagtttgctaatcctttcttctgctttatttagtctgatgttgaatccttctagtgaatttttcagccaattctctggagagcccacaaagaaaagatggcgtactggttgcacaaaccaaccccttctctcccctggatgagttagggcatctcttcctgactgtctggtactgtaccaggggcagtatctccagcaacagggtatcctgaatctccctactagcttcactagtcttgtttcatgttctctcaggatgcaacagcctttacaattagtttctgatttctcacaaacagaatttgtctgtgaattgttgctgaattagtattttgggaaggtgaggaagggtccaagtcttcctacaccaccatcttgctgatgtcaccccccactccttcattttgaaggggtatttttgcttggtgtgaaatcctggattgacagtttttctgcactttaaaaatgattctcccttgtcttcttgcttgcatggtctctgataatagatctgctatatgtaattcttattcttgttcctcaatagacaatttttttcttgttatcttcaagattttccttttatttttagtttccagcagtttaaatataatatgtgtagatgtgttttaaaattttgttttggtatttatctctgagcttcttggacctatggtttcgtgtcactaacttggaaaattctcagccatcatttatttaaatacttttcttccatctctgctccaattacccatcaggtccatttcatataagtcatagttatcttaaattcctgttgggttgttgcaatacctatgtcataactaagtcagttatgattattgctttgtctctttgaagtatgttttttctttttcttcttgcctttttatatgcctcataatcttcattgaaggctgtacatcttggatagtacagtagatatgaaggttaagaagtttttacacttaaacatgagtatgtcttttcttctgctaggtttttaacatggggggttatgctggtctattcaatagctggacagggtttgaggtttgtcattgctgtggttacactgagtgtaccccaggcttcaataatatcctctaataatatctgtgtttaaggtaagggttgatttcccatggttgttttctcaatgcatgtttctcccttagttttgggtgttccatttgtgctgctccccagagagaatctctcttgcaggcttcctagctgtactctactattgcttctatttgattcttgttatcttggtgggggttgagtagacggagggatagcattctcttatgatctcactaagcctcagtcttaggcagacaccatatccctaagtcttggggatgtggccttcacaagtgctcttgccgctctgccagctgtagtgctagtcctagagcatattcctcccctactcccagagatattactttttttcaggtccctttcctaaactgcaatagctttctacaagtctcctaaggcaactgtttttgctgctcttcattatgcagtgatagggaagatgggtttgggctgctgttgccctcccccagctaacaccacaaggaaaggcttctcaggattcactcccatcttccctatgagtgcctgttgggattcccagaggaaaagcctacaagagactgcaacccccacctccctaattttgcaagtcccccagtggtttcacactttcattagctgacattcacactttaaaaatttgtttaaaaacttgatagctgtattttcttactggcttatatggtgtctggcagagtccatcccaggtaagtaaagcttgagtcctgtttctctcagctggcatctttctttccccagatttaagattacttggttgccctgtgacctcagttctctgaagggtcctagaaaaattattttgtagtttgtccatttccttgttgtacggtagaagtttgtagtttccttgttgtaatgattgaagcaaagttctttccagctgtttacatccctaaggagaaacccaaagtcccctcattacaataaacttttgagaagtccttcagtttattttgtcatggggctcaaaaataccttgcaaataaagttaggattaggataacagtttaaagtcaagtaaattagctaggatggagtgggagtgggaaagcattacaagcaaagcagtagcaattggtaaggcctcagaaaagacggaattcagtatactggaggaactcaactttaagctaattgaggaaatactttagaaataaattcacaaactaaatgttatattcataacaaatgttatttttctttccactgcaaagaacttacttccagccatatcaatttgtttagtttctggactatcatgcatgattccctcctgaaatgagctctgatacagttaaaatgcttacagcaactgccatatctacataataatatatattttttaacactccacttgcttgaatccacgttttgccaaaaacctaaaactcattgaaagctctacacctggcagcatctctcaaggcagaaattctctagttagcgtgaactaactcacagactggggatatggctctgtggtggacaacagtattttctcccccacccccaactctttcctagtcttctctccactatttccatgtgtccccggattccaggtcctaccacaccactttgcaacacatgtttaaatcacaagggaaaagggccaatgacacatgaaagaaggatataagggctggacccacttatataagggcacccactgatggctggaagaacagcattaaactctgtgggtaccgctctatctgggatctaaagttgccaaagccagttgcaactacaggaatcaaaaatttaatttctcaaaagcttctttactttgttttctctttaatttggttggcatgtttgaaaacatttttattctactctcatactcaaataataatttggctaactgtaggcttctcagaaaaacagtttttccttagaaatttaaagcaatgtgacttcactttgtggctccagtgacttctagtgttgctgtacattgacattctacttctagatcattccaactttttttttcctctgtagaaagtttttggcctttcttctctcttattggtttccgatagttggtgtgggtttttctcattaatcgcactgagcttttggtcagtatatatcacggacatacggtcatttcaatccgtatatttattgttctcttctaggaaattttcttgcacgtttttgttttcattttctctactttctcttacgtataattcctaagaataggatgatctatcccttaaactgatcatctaagtgtcttatattttatctcttaacatttctacttctctcttagggcccgtatgtttgagaaggaagctcccacttatgttagttaaacattaagtcacagagctctccattaagaaaactttttctttagacagggagttgaagcttcataaaacagtttaactgcctcctactttccttccctctagttcactctaaacatacttgtatgtatacattctagaaattttcttccaaaatttattacttttaaaaactcgaggccaggcacagtggctcacacctgtaatcccagcactttgggaggctgaggtgggcggatcacaaggtcaggagttcgagattggcctcgccaacatagtgaaacctcacctctcctaaaaatacaaaaaattagctgggcatggtggcaggcgcctgtaatcctagctactcaggaggctgaggcaggagaatcgcttgaacccaggaggcggaggttgcagtgagtctagatcgcgccattgcactccagcctgggcaacagagggagacaccgtctcaaaaaaaaaaaaacaaaaaacaaaaaacacaaaactcaaactacaaaaatgttggaagatcagtacaaagaatacttctaaaacccttaatctatattcagcattgccacatttttctacctctctttccttctctaaaaacatatacacaaacttcacgttaactctttcagaatgtacctccaaaaactaagaagcctcctacataaacacaatgccattatcacaccaaagatattaaacattcgtacaataaaatatattatctctatacttccctagttgtcgcaacaatatcctttaaaaccaattttaaaataaattgaggatttaatcgagaattctatacttataaaatgcatcttaagtaacactcccctgtttaaacttctttttttccccttgcccaaaatttactggcttatggtaacagagaaactgaggtatgtggaaatatgaaagaaaaagagagtgatggaatgtggaattggtatataatgtttaagaataaacaaaataaccatggaatactatgcaaccataaaaaggataagttcatgtcctttgtagggacatggatgaagctggaaaccatcattctgagcaaactatcgcaaggacagaaaaccaaacaccacatgttctcactcatggatgggaactgaacaatgagaacacttggacacaggatggggaacatcacacactggggcctgtcatggggttgggggaggggggagggatagcattaggagatatacctaatgtgaatgacgagttaatgggtgcagcacacgaacatgggacatgtatacatatgtaacaaacctgcatgttgtgcacatgtaccctagaacttaaagtattaaaaaaaagaataaacaaaataaaactggaaaatcttagatatttttatattctttttttttggagacagagtctcgctctgttgcccaagctggaggagcgcatggctcgctgcaggcttcatctccgagattcaagtgattctcccatctcagcctcccaagtagctgggaccacaggcatgcacaaccatgcctggttaattttgatatttttggtaaagatggggttttgccatgttgcccaggctggtcttgaacacttgggctcaagtgatctgcccaccttggcctcccaaagtgctaggattataggcctgagccaccatgcccagcctgatatttttatattctttatggagtcctttttaaaaagtgtattttattttagattcaaggggtacatgtgcttgtttgttacatgagtattaccttaaattacttcaatgacaacttttataattttgtttctgaatacctcattagcttcatctttcactccttgaaagtaaactccagccatacataattacatacctttcttaaaatatacaaagcattgctccttaacagttactgtatattacgtttccatgcctaaaaactatctcttgattgctgatcatcagttccttcttgcctttgaccaataccttcttgttcttaaagagatcagattaagaacaactttatcatttgattgggatatccgtctatgtagatctatttgtacttctgtatctcatgagcttaaccatcttgtggcatttatcactctgccagtgcacccactgatttatctaagtaggactgtgaaccacttatggcagggactggtcatatggtttgatgtttcatggcccagcacaacctatataagaaaagatgtgcagtaattttgtgcaatgaatttaaaataactatgattaatattttgagtgctctatgagaaagttagaaaaagagatgggtactgtaagcagggaaatgcgaactataagaaagaatcaaaagaaatgctagaaatcaaaaacatattaataaaaacaaagaatgccttcaatggactcatcaacaaactcaacacagtagaggaaacaatcagtgaacctgaaaatagaaacttcaaaagaaacttcccaaactaaaatgcacagaggaaaaagaatgaaaaacaaaagagaacatccaaaccatgggagaacatccaaaccatgggacaatatcaaaacatgtatctattaaacagacatctattttcccaattagaaaaccaaaaggagaaaaaagagaacacagatgaaatattgtaagtaataatgtccatgaatgtttcaaattagtgacacacaccaaaccataggctgaggaagcgcaaagaacactaagcaagataaataccaaaaaaaaccacacgtgtatatcatattgaaactgaaaaaacaacaacaaaaaaaaacaaagaaaagatagtcaaggaacccagagaaaagtaacaccttacctataaaacaacactgataaaaattacagcagacttcttgtcagaaactatataaacaagaagaaagtggtgtgaaatatctaaagcattaaatgaaaaagagccaccaacctagaattctctctatccagggaaattatccttcaaagttgaaggagaaatgaagactttcatttctaacaaaaactaagggaattcatcaccagcagacctaccctgtaagaaatgttaaaaagttatttaggcagaagaaaaacaatataggtcagaaacatggatttacataaagaaaggaagagcaccagagacaaaatcatgaaggtaagataaaatcttttggttcttttattagtaattgatctaaaagataaatgtttgttaaaggctataatgataacaatgtattaggtgattacagcacacggataagtgaaatgaatgacagggacatcacaagtgacataacaacggagaagaagggggaactgggaatactgttgtaaagttcctgcactacatatgaagcagtatagcattttcaaaagtgaatttagattacttaaaaatacacattgaaaactctagggtgacactaaaattttttaaaagaagtataaatgataaagtaaacaggagataaaatgaaataatataaaatgctcaatgaaaaccgtagtaatcagacaaaggaggggagaagagaagaaacaaaacaaagaaataaaaaaattttctatttgcatacgaagcaaatggaaaacagctaggaagatggtagtgagctaggaagatggtagtgtttttttgtttgtttgtttgtttttgagacagagtttcactggagactccagcccaggctggagtgcagtggaacgatcttggctgactgcaatctctgtctcctgggttcaagcaattctcctgcctcagcctcaactgggattacaggcatgcaccactatgcctggctaatttttgtatttttagtagagacagggtttcaccatgttggccaggttggtcctaaactcctgacctcaggtgattcgcctgccttggcctcccaaagtgctgggattacacgcatgagccaccacgcctggccaatggtagatgttaatccaactacaaaaataatcacaccaagtgtaaatggtccaaacacagcaattagaagacagattgtcagagtgcatttaaaaaaaaaaaaacaactatatatgtctataagaaacccactttaacattcaagttacaagtaaagagatgaagctaggcgtggtagcgtgcacctgtagtccaagctatttgcaggggctgaggcagaagtttgcttgaacataggagttcaaagctgcagtgtgccatgactgcatctgtgaatagtcactgcactctagcctgggcaatacagtgataccctgtctcaaaaaaaaaaaaaagtcaagggatgagactggtggcctatccttccctagaaatgaaaaaaacaaacaaaaggcaaaacctgtctgaaccagattttcagaaattctgggagatagtcaaaggttgcacccaagcaaacacttaacaaaaaaatttgagcttcaaaaagaaaataagtgcagtgatttaaaacacatcaaatatgctaaaaatgatgaatatataatggtgataataataaaaacaacccactaggagatgccagggaaccactccaataactcaaaatcatataaagggaaataatccatttattctgccttttctgtacaaactgtacctaagggtgaacaaagagttgacgaggaaaattttttctttaggaaaatattctagctagtaaacgaagtaatgacagaattagaatatcgccattttgtagcccttactgaaataatgggtctagttagtaatcatccatgttttctaaaaccggtatagtggtaagaagaactgttctatttttaaaacatatgaaaaatatcctctttttttttttttttttgacagagtctcactctgtcaggctggagtacaatggcgtgatcttggctcactgcaacttccgcctcctgggttcaagcgattctcctgcctcaggctccagagtagctgggactacaggtgtgcgccatcatgcccagcgaatttttgtatttttagtagagacagggtttcaccatgttggtcaggatggtcttgatctcttgatctcgcaatgtgcccactatggcctcccaaagtgctgggattacaggcatgagccaccatgcccagcccatccttctatgtctcaccttacttcctctaatattacaacccaatagtccttcagccctgtcaggagcttccattccttgattctactaattttttactgtccttcactctcttcctatcctcacttttccacttacctagcctaaaatccacagtcaaaacaacaatcaattattttgccaacttaagactcttcttgcctctctctcacattattcctctttgcttcatgaaaccaacattctggttaaatccaaatctccccctagcctgtctggctgcaactatgcggatgaacactgcaggagaaaaatcacacagctacacagaataggctcactttaaattcataaatactaacattaagtgggtctttgatggtgcctgaaaatcataatttctctattctctgtcccaatctctgtgattttttttcccctgttcttctcaaactctagcacgtcctccaccaatctcactctcatttgagtctcttgctaggtacttcactataaagttaaaacaatcataagagaaggtttacaagttctcaccaacacatctgcccatctacttgtatctgtgcctgggtacttctccctctctcctgttattgccgtggtcaagctccaagctcagccaaactctgccactagatctcatttgctctggctacttaaggacatttttatattatctgctttctctcctgtattgtagtttctctctctaccggatcatttcaatcagtatataaacagaatgtgtacctcttaactccagctaccattccatttcacttcttccatttagaaaaaaaaaaaaaaagtcttcaagagttgtctagacttgatatctccaacgttttcttttccagttctctctttggcctaaaattccacggacactgctttcagggtccctaataaatgaatttcatgttgccaaattccatgcttctttctcactcctcattttatgtggcacccgacacagttcttgttaaaacacattcttcccttggtttccagaatatcacactcacctagttttccttcaacgtttcaagctagtccccatcagtctcttttgctaattcctccttacttcccagagtttgttatgttggagtgactcagagatcagtcatttgcctctacctttctctatctatcctaccctctaagtgacctcattcagtctcgtgttaaataccatttatatgctgataattcccaaatatatgtctccatcctagatcttagatctcccttttgtctctctttttgaatttcatacttgtatatccaactgccaacttgatatctccacttgaatgtctaatgggcattctcacatttcacatactatattccaaactgaaatctcactacattccaagtcagtttttcctacattgttccccttctcagttaatgacacacccattcaagttactcataaaaacagtattgtgtcaccttgtctcattcacactctacctcagtttgtcagcaaatcacagcagctctacctttaaattatatctagtacatgactacttcttagcatttttactactctggtccagatcaccaatatcttttccctaaagtactacaatacagtcatgtgctgcgtaacaatgtttcagccaacaacagatcacatatacaacagtggtcctataagactttaatgaagctaaaaaattcctatcacctagtgacatcatagccatcataacatcgtaacacaatgcattacacacgtaacctaggtttatataagtacactctatgatgtttgtggtgatgctagtgtcaacacccctactgcactgatagtggtataaaagtatagcacatacagttgtgtatggtattagtatttgataatattattgattattgatcatgtgaatagtacataatacttgacaataataataaatgactgttactgctttatgtatttactatactatactttttattgttagagtatatccctacctaagaaaaagtaaactataaattagcctcaagcaggtccttccagacgtattccagaagacattattatcacaggagatgataaccatgcatgtttattgttccatgcatgtttattgcccctgaagaccttccagtggaacaagatgtgaaggtggaagacagtgatattgatgattctgaccctgtgtaagcctaggctaatatgtttgtgtcttagttttcagcaaaggagtttcaaaagttaaaatatttttaatagaaaaaagcttataaagatataaagaaaatctttttatacagctgtacaatatgtgttttaagttaagtattattataaaagagtaaaaaagtttaaaaaatttaaaagttcatgaagtaaaagagttacagtaagctgaggttaatttattactgaaaaaagaaaaatgtttttataaatttagtgtagcctaagtgtacggtgtttatagtcaacagtagagtacactaacgtcctaacccttcatattcactcaccaccacacacacacacaaaatatatatataggtataccaattttaatcgtatttatttatttatttttgagacggagtctcactctgttgcccaggatggagtacagtggcgcaatctcagctcaatgcaagctccgcctcccgggttcaagcaattctcctgcctcagcctcccaagtagctgggactacaggcgtgtgctaccacgcctggctaattttttgtatttttagtagagatggggtttcaccgtgttagccaggatggtctcgatctcctgacctcgtgatccgcccaccttggcctcccaaactgctgggattccaccgcgcctggcccatttttaatctttatatactgcattttcactgtatcttttctgtgtttagatatgtttagatacacaaagtcttactactgtgttacagttgcctatggtagtcagtacagtaacatgctgtacaggtttgtagcctgggaacaataggctgtgccatatagcctaggtttgcaggaggctataccatctaggttgtgtaagtatactccatgatgttcatacaaggacaaaattgtctaaccatgcatttttcagaatgtatccccatcattaagcaacacaattgtagcttcctaattggtctctgtgcttcttcccttgacctccctgctctttcctcattcgtcctcccataggccattctcatcagagcagccaaagctgtcttcttaaattgtaagcagatagtatcacttccatgctcaaaaaccctccagcagcttcccatctcactcagaggaaaagccaaaattaatactacgggccataaagcccaatttgatctgccctcctcccatccacttacctttcttctcttctctcccactactctccccttcaattattctattttagcctcttcattaacaggcatgttgccacttcagagcctttacaactgctgttccctctgcctggaataacttttctcactcacgcataaatagctcctttacttccttcatatctttattactaccttttcaggatgccttccctggcgagcccatctaaaactcagactcctatctctagttctaaatatcctctcacttcacattttttcttagtattcttcaccatttaaaatacttcatacttaatttacttaccttgtttattatccagcccacaaaaatgtaagtaccatgatagtagggggtttgtctcttgttcactgctatatcccaagcacctaggattgtgcctgttacacagacagccttcaataaatgagtctatgaatgaatgaatccttaatatatgaagaactctggaaaagaaatttgaaaacagaacactactttagaaaacatataatttacaaaagatttttttaaatgcttgacttcaataagtaatgaaacaattgttttagagcaaattaatttatatccatgaggttaacaaagattactactatttagaatatccattgttatcaacagtgtatgaggatataagcagtcttatactatgccaataatactgcagattattggaactttacagaataattggataggttctgggaacctttaataaaagcatacattttaacctatcaattctacttttaggagtctgctccccctccaaaaaaatttagaaaagtatatttaaacacgtgccaaatagttgctgataaacacagtttataatttcaagaagctacagagaactaaatcacccatcaacaggggtaaacgtataccatgaaatactttaaaatgaatgcataatttgtgattgtttaaatggaaagatactaatcatacattgttaaacaagaaaggttggttacagagctgtatgtatagtgttactgcaattttgaagccattatgcacacatatagaacatatgaatgtatacgtatgtatacacaaaggcgggggtgaaaagatggaaagtaaattttgacagtagttgcatggcctgtagaactatgaatgatttttgttcttcgagcttttctgtatttttctccaccccactccactccccaaatggggtggagtagggaaggaggagaatgagtttagtaagtacacaaaacaacgtagctaatacacgaaaataaaattaaaaataaataaatattaaagtgttggggatatcgatgtttcatataaaaacatatttccggccgggcgcggtggcttacgactgtaatctcagcactttgggagaacgaggcgggtggatcacctgcggtcagttgttcgagaccagcctgacccacatggagaaaccccgtctctactaaaaatacaaaattagccaggcgtggtggtgcgcctgtaatcccagctactcgggaggctgagggaggagaattgcttcttcccaggaggcggaggttgcggtgagccaagatcgcgccattgccctccagcagcctgggcaacgagagcgaaactccatctcaaaaacaaaaacaaaaaaacaacgtatttccaatgaccaaagctaaagacatgcagcgctggcacaaacgccaagtctcacacatctacacccacaagcacaccctaccttgtatccacagtttttcattcattcaagatcccactgtcatgcacgtttgcacgcaggttcatactgaaagataaaagggaaagcgcctccacgaaatccgcttacggacacgatcccggggccacactcagccagacgaatgtctggcaaatgacagtcacttcacgccagactctcacagtccttcacacgccactcccactgcctcagggaaccacaagcacaggcatcgccccgcccggcgtcctcctccaaagattggggcaccaggaccgcgggcccccactcccacccagcacaaagagtccggcgctcagagctagcggtttcccgaggactcaccaccaagcccgcggacacaggccccgattccacacttaacgctgccaaagtggcagagccggcgcgggctgggacagaggcggcactgaggccggcgctgtcggtggctgagagcgccacaagtctcggtccgttacaccaggggcgacgcttcccagaggcccccgcggctcacccgggcgggactggcttcactgtttgcgcgtcctgagaagcagaccacggtgttccagggctcacagctccgcgcaggggagctcagcctaggttttgcacgagcggcctcccgcgagcccagctctgagagattgggagcgcaacttggtgctgagaagaatcgaatcgttccgctgcttcctgcgccgaactacatttcccagaggccttcgcggccctacttccccgaccccacctgcaaaaaggcacttccttcttacagtcggctggagctgcaggttcgcaaggtccgtgaaggaagcccggctcagtgtgtttagttccgtctttttgggtctctacctgaggctagaatacagcggggtgaaggtggtgagagctccagggccagtgaaggccgggtcagctggagccttaaggtcctgacagcggctagaagagggaggagtgacgtagtgtgactgtatgtgtgaaacttcggccatggaatttggagtggggtttccagggcgagagaccctgtccagtgacatctgaggtcgtgcgaatatgcgaccttttgtgtgaccatggtcgcgttttatattctcgtggctgtttgattctgaccttgcagttttgtcagagacaatgtgcatgtatttgttctttctggacttctcgattgtgagtgtgacagtgttattggatttcatgacccgggatcgtgagcgaaaagtagtgtggccagaccgcctgacttctaaacagacttggccttactagctgtgtcatctcagactaggtacttaacttctctatgcctttcgtgtttttttttttttgtttgttttgttttttttgaggcagagcctcactttgttgcccaggctggagagtgcagcggcgcgatgttggctcactgcagcctcgaactcccgggctcaagcgattctctgcctcggccttccgagtaactgggaccacaatcaagggacactccgcccggctgatttttgtttgtttgttagtagagataaggtctcgctatgttgcccaggctgctctcgaactcctgagctcaagcgatcctcccgcctgggcctcaaaaagtgctaggattacaggcatgagccgcacggggccggtcttaatacctttaataaagagataataggccggacgcggtggctcacgcctgtgatcccagcactttgggtgggcaaagcgcacggatcatttgaggtcacgaggtttttgtttgtttgttttttaagacggagtcttgctctgtcgctcaggctggagtgcagtggcgcgatctcggctcactgcaacctccgcctcctttcgcctcccaggttcaggcaatttttctgcctcagcctcctgagtagctgggacttaaggcgcgtgccaccacgcccggctaatttttttgtatttttagtagagacggggtttcaccatgttggtcaggctggtctcgaactcctgacctcgtgatctgcccaccttggccttccaaagtgctgggattacaggcgtgagccaccgtgccaggctgagggtagcgggtgggagactgccaggagtgtagtgcgcttgcgcagtttaccaccctgcatcccccccaccccgctcccctcccaatttttttcgggtatccagcacaattctaggaattcgcctcccacccattttgagtagacgcgccactagcgcgttcccacgcacaaaccttttccctgcggccaacctgcgattctcaactccccgccctggttgctaagggaggcgcgcagagcgcttgtgcctgcgcacttccacaccagcccgtgtagtgtgacgctgggccccgtccctgtgaccgggccaggctcggagctgcagggaatccggactttcgggctctctggaaggccggggagaggccagtgtgggaggacctggtggggaggaggccgtgttacaaaccctgcgcggagctgcaccgctgctgccagacactgcgacgccgcgaccttttctactccggactacgtttcccagcggaccccgcgggagttgggccggcggcccctttgtgtcctccgggggcggaggcagctgaggcgcttctttccgggcccgtaagggctgggttccatccaactaagggtagcggtgagacccgagtgcagattccccgagccttcggggcaggaaggagatcttccaccagttctgttctgcaggtcgggagtgggctgaggagtggcgtgtgggtctccggaagctcgtcgcaggccatctgtgtgactccggtgcgagtggaggttggtaccgttcagtgcgaggctgtcaccccgtgtgcctgtccacgtcctgtgtgactgggtgcgaggaagtcaatggcaccgtggaatgtgaggctgtgagttgaggcgggagcgggcgactgttcgctgcaccttgttgggccgatacccgcggcttctttgtgactgggttgtgagattgtcgcttgtgatagataccctggtggctgagccttgccggtatgggaaagggtgcccgtgtgaggcagtccatacccatggcctctgactgtggcgtgggtaagacggtggttggcactgtagtttttcagactctgattatgtgggggattgagtgagagactgtgtgccacggagaggcttttaaagccagcccaagtcatatcaatgtgccaccaagtttcagaatcactgatttattggagaggaggattgtggggtcaggtcctcttttatttgatcttggtgctcttatttgttagttctgtgtctttatgtgaaaacttacattcctctgagtctgtatttgtaaagcctagaacatctgttgttaacctaaggaattgggaaatgatttaggcatcagttaaattgtatgcaaacaaattcctaggtctccattatgctctctctattggagggaaggttgcaagaggaggaaagagaatcctaaaaagtctagactggtgattctggatgctgcaagaaaagtctagtttctcatgttcttttccccatctcagtcatctgaggccactgctatttcccaagagaagagccaggaggaagaaagaatggctgttgggcttcttaaagccatgtaccaggtgtgttggtgttttctcgatttcctgaatacctgtctgcttttcaaaacaagcaggtactaattttccttctgctgaaacgtttctgggtaaccagtcatgtcccttatcaacactctccattggattcccatcttattcaagataaacgcgtaagtccttgtcttgacctgcagggccctgcataatctggtccctgactgtccctctgacttcatctaatttttctcatcctgtctttaactcagtcactcagttccagcaacactagcttccttgtaatgtggtgagtacattcttatttattcttttttttttttttttttttttttgagacagagtctcactctgttgccaggctggagtgcagtggcgcaatatggctcacggcaacatccacctcctgggttcaaacgattctcctgcctcagcctcccgagtagctgggacgataggtgtgcgccatcacgcccagctaatttttgtatttttagtagagacggggtttcaccatgttggccaggatggtctgaaactccagacctcaggtgatccacctgcctcggcctcccaaagtgctgggattacaggcgtgagctaccatgcctggccagtgagtacattttttttttttttttttttgttgagacggagtcttgctctgtctccaggctggagtacagtggcacgatctaggctcactgcaagctctgcctcccaggttcacaccattctcctgcctcagcctcccaagtagctgggactacaggcgcccaccaccacgcctggctaattttttgtatttttagtagagacgggatttcaccatgttagccaggatggtctcgatctcctgacctcgtgatccgcccgccttggcctcccaaagtgctgggattacaggcgtgagccaccgcacccggccactgcacccatgcattcttaatgcatggccttgcacttgctattctctctgcctgggatactgttccctcagatacccgatacagaccaacttcctcactctagtctctaaccaaaaacgttcattcattctaatttttagtaagcacccattaccactgggtgtcgcaggtcttagtccctcatcctgttctctacacttactaccctggtgatctcatcctgtctcatagcctcaaataccatgtatatgccaacaactaccaaattgtgtacagcccagacctctctcttgaactctagacttgtatacctgactgcctacatcttcatttggttgcataagagatatgtcaaatgcaaacatcttacaaatggagtgaaatgagccattggcggttttggaacatgagtgacatgaactgattttcattttggtagcatcactctggttgctactgagagtaaactgaatgggacaaggatagaattagggaactcaactaggaaactcttaacgtacttcctggctccattgcttaagctaaacatcttctatcaggaaattagagacttcaaaatacatccagaatcagactactattttttttttttttttttgagatggagtctcactctgtcacccaggctggagtgcagtggcacaatctcaactctctgcaacctatgcctctccctgcttcaagcgattctcttgactcagcctcctgagtacaggcacgtgccaccatgcccagctaatttttgtatttttagtagtgacagggtttcaccatgttggccaggatggtctctatctcttgaccttgtgatccgcctgcctcggcctaccaaaggctgggattacaggcatgagccatcgcactcggcccagagaactttttactatcaccactgcttccattatgttctgtaccatcatctctcacctgtgttactgtggtactctcctaacttctctctctacctctactcttgttctttttagtctgttctcaatggagcagccaaagtgatcttgttaatacataagttgtatgatgtcattatttataggcgggggtgggtggaagtaatagaaagcatagacaactctttcaaaaagtttagctataagagaaggagagacctgggcacggtgactcacgcctgtaatcccagcactttggagaccgaggtgggcggatcacctgaggtcgggagttcgagaccagtcagaccaacatgcagaaaccccgtctctactaaaaacacaaaaaattaaccgggcgtagttgcgcatgcctgtaatcccagctactcaggaggctgaggcaggagaatcgcttgaacctgggaggtggaggttgcggtgagctgagatggtgccatggcactccagcctgggcaacaagagtgaaactttgtctcaaaaaaaaaaaaaaaaaagaaggaaagaaatgggtggtaactgaaggagaaagtcataactgacaaagtttcagaaagatggatatatgttggcaggctgatgttaaagattcagtagaaagggaaatttgaagatgaatagagaaaaaggaattgctggaacaatgtgcttaagtaggtgagaggagctaagtgtttggccttttctaggaaagtgggttgttcagttataggaataagggcatgttagggtgtacaagcacaggtgcaggtggaagtgtagatgtggtgggagtttgtgggaattatctttcaatgggttttgttttctcagagaaaataagattatcagctgagagtgagcatggggaaggagatcttgaaggtgtgaggtgagaggggacagtatcaaatggtcatttagcagagtgaagggatgaatggactagggaaatgtatcatgcagcatttccgcccacttgaggttaagtgatcatgaatttaaagtgagactgcttagcatggttggtatgattttctctagcagagttcagctatgcaggatacaggcacagagtaagcagaaaaatggctgtggtttaaccaagtgagtacagttaagtgagagaggggcagagaagacaagggcatatgcagggggtgattataacaggtggttgtgctgggaagtgagggtactcggggatgaggaacagtgaaaaagtggcaaaaagtggtaagatcagtgaattgtacttctccagaatttgatttctggtggagtcaaataactatccagtttggggtatcatagggcaacagttgaggtataggaggtagaagtcagagtgggataattgaggttatgaagggtttggtactgactggtactgacaaggtctgggttatgaccatgggaatgaatgactgtagaagcgtagaggatgagactattccaggagagaggggtcagagaactaagaggcgaggttgtggggagtattatttatgtggatatcgaagtgaccaaagaatgataggaatggcattgaagagagtaacagtgagtcaggtgctgaagaatttaaggactgacagagaactggtgtctatcagaaattagtagatatatatcacaaggagggattgtgattgacatatcctaatttcatgaggtttaaaactagatgtcttttagggaggaggaaatggtttggaaataagagcaaagaggtgacctgcctcaccttcaggtgctgtggtacaaggaatgtggggaataaaacattcatcagtgatagggcatcaggggaagtcgttctctcagctggaagccatgtttctttaagggcagaaagaaaacaggaaaaagtgggaactgtagttttgcttcagactggtttaatgataattgtgaatggattttgaaaccaagtatttgttaggggtcaaatattttaagatcagaatttaagctcctatgttgacatagaaattatttttgttgactatcaagaatcagtggaaaatatgtatgtcatatataaatatttatacatttattatatgtatttatataagctaaggaaaacattttaggaagcattgttagcaggagcagagagggagagatttacctacttcctataattaagtaagaaaaaaggtgactgagcattgaacttgaagaattttgcttctgtagagatagtttcttttgttttgttttgtttttgagacaaagtcttgctgtgttgcccaggctggagtgcagtggcccaatctcagctcaccgcaacctctgcctcccggattcaagcgattctcctgcctcagcctcctgagtaccggggattataggtgcgcaccactatgcccagctaatttttgtatttttagtagagacagcgttttaccatgttggccaggctgttctggaactcctgacctcaagtgatccacctgcctcggcctcccaagtgctgggattacaggtgtgagccatctcacccagcctagagacagtttctttaactgtaacaaaattgtgtcaaatgcaaaaggttgcattgacaggttcacatcttttaattttgtaaaaaattaaattaatacatacacatataatgtatgtttgtttcatcagcaagtggtcacattatagaaacctggaatccagtggcatcacagcagcattaagttttttttgttttgttttgtttttgttttttttttttttgagatggagtctcgccctgccgcccaggctggaatgcagtggcacaatcttggctcactgcaacctccgcctcctgggttcaagcgattctcctgcctcagcctctggagtagctgggactacaggcatgtgccaccacacctggctaatttttgtatttttagtagagacagtgtttcaccatgttggccaggctggtctcaaactcctaaactcaggtgatccacctgccttggcctcccaaagtgctgggattacaggcgtgagcccagctcagtgtcaagtttttaagaactttctctaacccctgtaggcagaagcaatattatgagtagaacacccatttctttacacaaaattttgggaactctggattaaagtatttgaattttaatggaattgatgctctgctctgcttggtctagcacagttttcagagatacagtgaatactttctggtattgtttttgatccctttctagcttcttgaaattttcttcaaaccactcattgattaattcaactgagtcagaatttgaatacttcacatgtgccaggttctattctgtacctggggataaagcagtgaccaaagccaaaacatactctgccctcatggagcttaaattttagttgaggagggtgaagaacaggcaatgaataaaataattaagtgcagtggagaaaaataaaggagggttaggaaatagggaattggggtggaagcagtgctattttatactggaataatctgagatatacaaaggccctgagtacaaatatgataacatggttacatatttgaggatgtaatatcagagagagcccagtgtgcctagggcagaggaaatgaggtgaatatggtaagagataaggttcttccatttatttcatttcaggagttggtgaccttcagagatgtggctgtagacttctcccaagaggaatgggattgtctggattcttctcaaagacatctgtacagtaatgtgatgctagagaactacaggatcttggtatcactgggtaaggatatcttcttgcaaaactgagcttctgctcaaaaggggctctttgctaccactattgtgaatttttggataatatctgcaaaatttggctgaatgtctgctgcctatgccaaacaaatggcttagtgtttgtggatttggcagtgaacatattcttggcctgtgcctgaagcttcatcttccttatccttctaatacatgtcctttacacatttctctttttgcttactgtaaactcccttttccctgatgagctaaggattgaatgtgagttctggaatatccacagcatgacaaaactctacttttttttttcgtatttgcaggactttgcttttccaaaccaagtgtgatattattgttggaacaaggaaaagcaccctggatggtgaagagagagctgacaaaaggcttgtgctcaggttagtgaagaggaaattggcaaaaatctttgcacgtgacagctcagcttgactcaaaggtatcacctcttcactcttcaggcttccaaattcttctcaaatgttctaggttttcataaaaatttggggccatttaggatgttctcccacatttgttatttttaattatttcccttctcttactttcctatctcctttctaacaagtcccatcccctctcagtttcataagcctctcagtctttaaaaaatcttgtagtagtcttataaacttttttttttttttttttttttgtgacagagtctcgctctgtcacccaggctggagtgcagtggtgcagtctcggctcactgcaagctccgcctcccgggttcaagcaattctcctgattcagccttcccaggagctggaattacaggcacatgccaccacgcccagctaatttttgtatttttagtagagacagggtttctccatgttaggctggtctcaaactcctgacctcacgtgatctgcctgcctcagccttccaaagtgctggcattacaggcatgaaccactgtgcctggcctcttataaatttttgagctctacagagcatcagaagtgtaggcagccttggggactgagtcctcaacctgagggatctgatgctatctccaggtagacagtatcaaaatagagctgaggtagaggacacccactgcagaattcattgcttgcttgttggtggagagaaacccccacattcagtcacagaagccttctgtgtttattgttgtggtgcgagagaaaaggaaaaacaggttgcatgtgtgatttttcctaaggtgctcattgtgggggaggttgtcgtgtgtgtgtgtgtgtgtgtgtgtgtgtgtgtgtgtgtgtgtgtatttgtaacttttttttttttttttgagacagagtctcgctctgttgcccaggctggagtacagtggcatgatctcggctcactgcaacctctgcctcctgggttcaagtgattctcctgcctcagcctccccagtaactggaactacaggcacccaccaccacgcctggctaatttttttgtatttttagtagagacgaggtttcaccatgttggccacgctggtctccaactcctgatctcaggtgatccgccagcctcagccttccaaagtgctgggattacagacgtgagccactgcacccagcctgtagcttatgtttttgatactttaagaaacctttctatgttctgagttcatatagatatctgaaaatagtcttttaaagattgtccttttatatgtaggtccataatccaattggaacttatttttgaggattattttaaataagaatttaatttctgtatcttatggaaaaccaaaggtcccagatattttttgaataagtgttccctctgcctgtttttctgaatgttacctcttaatataccaggttttagtctatatatgggtttgactttaagctttattcagtttcattgatctctgtttccttataccagtaccacactgtcttaataaaaatagtttattagaaggataattatctgctagggaaaatctctacagcttgtttaaattctttagaatttcttgtttgccctttggacatcaatataaagtttagggtcaacttgtaaatttctatcagaaaacaacaaaatgctgttaacttttgattcaaattttaacttttgattcaaattttatttattctgtaatcaattctggaaattttaaaaattcattaacatggtatagctctccatttatttaggttttttcacttttttcagtgttttataattttctccaaaaaaggctttgcacatcttctgttagattaaattgtaaacattaaacatattagttttgttgctgtgttaaatgttatctatattttctgtttgttgctcatatatagaaatgaaattaacttcgtatgcattggccttatatccagcaaccttgccaatctctcctgttaataatatttttaaatatgtttggattttatgtatgagtagatatatttgtgaataatggtagtttcttcattttcaattcttataccttaatttatttttctgttgcctttgtcgtatctccagtataatatgaatcgaagtagtgataacaggcattcttgtccacttccggtcttaataagaatactttagcattttgttttttaataattttgatgcttaaaagttttggtacataccctttcattcctgtttgctagagtttcattgtggaaagcttttgagttttaacaaatgtttttctccatctgtgggtgatttttacctcttaataggttttagtttttcacatcttaatgtggtaaattacatacattttcaaatgttgaaccaacattgcattcccaagttaaacccatctttatatcttttccactttttgctagttgctgtttgccaatattttgtttgggtgttttgcatctgtatttattagtgaatttgatcttcagttttcctttcttgtcagatttcggaatcaaggttgattagtctcgtaaattctctttttcttctttagaaacatttgtgtaaaataaaaattatttgttttttgaatgtttggtagaactttgttcattttggcttggaatttttattgttaaaagaatttaaactaatcattcaatttgatatgttctaaaattctaggttttctatttctcctagaggcaattagggtatttttttctaaatatttttagttttgatgtaagttttcaaacttattagatgaagttgtccattatttttctggttctcaatgatttcttgatccgtgaattatttagaagtttgaaattgaaggcttttgtttggtacttgtttaattgtattatggttagagaatgggatctcttcaatatacatttattgaaagtattttgagacttgctttatttcttagggctagttttggtaaatattctttgtgtccttgaaaataatatgtattttctggttgttgaatacagtgtttgatatttgctcattaggttaagctcattaactgtgctggtcaaatcttctgtgtccttatgaatttaaaaaaaatgtctttgagccatcaattactgagagacatgttaaagaaacttctactctggtggtaaatacataaatttttttcttgtaattgtaacagcagttttttttatattttgaaggtatttcatttggtcatatgtttttagaatgttttatttttctagtgaattcttatattattgttactctctttaattctagtgactatctgattaagcaaaaagaattcacttaatattgttatagctatatttgccttttgttaatatttacttgatgtagttttttcctactcctttattctccggcttgctgtgtgtttctcttataagcagtatttggataaacattttttaaaatccagtctgataacctttatcttttaaccaaatgatggtggtggtcagttaaattttttggtactattaatagatttggatttattttccactacctcactttcttttataaattgtgccttttcaaatttttcttatttcttggtttttctccatctcctaatttgaatgttttacaatctatttctattctgtactggttaccttagaaaatctaacatttatagtcaccttaacaaaacctaaaattaattctaatctttatatttgaccactaaaaatacaagaacgtagccaggcacggtggctcacgcctgtaatcccagcactttgggaggccgaggcgggtggatcacgaggtcaagaaatcgagaccagcctggctaacatggtgaaaccccgtctctactaaaaatacaaaaattagctgggcgtggtggcatgcacctgcagtcccagctacttgggaggctgaggcaggagaatcgcttgaacccaggaggtggaggttgcagtgaaccaagatcgtgccactgcactccagcctgggcaacaagagcaaaactccatctcaaaaaacaaaacaaaacaaaacaccaagaaccttagactgtcttaacttcacttaccctcatttcagttattccttgcttttcttaaattattattttgctttatgaagttgtataatagaccattattatatttatttaatttagaccatattatatttagtgttgtttagatttatccacttttggctaggtgtggtggcttatggctgtaatcccagcactttgggaggccaaggcaggtgcatcacttcagtctaggagtttgagaccagcctgggcagcatggtgaaaccccgtctctacaaaatgcgaaaattagctgggtatggggtgtgtgcctgtagttccatttacttgggaggctgaggtgggagggtcgcctgagcccaggagttcaaggtacagtgagctgagaacgtgccactgcactaccgcctaggtgacagagcaaggctctgtctcaaaaaaaaaaacaaaacaaaaaattatccatgtttgtcattttccctgttcaccattctgtcccagaactttttcctgaagtaacttctttataaatatttatatactattcatatcaacttttattgttgttatgttttgttcatttatatgatagttttgctgtcatgcatagaagaagctttctctgtcagtcatagattgacagattttttttttttttgagatggagtcttgcactgtcacccgggctggagtgcagtggtgcaatctcggctcaccgcaacctccccaacccgcgttcaagcaattctcctgcctcagcctcccgagtagctgggattacagggcgtgccaccacgcctggctaattttttgtatttttagtagagatgggggtttcactatgttggccaggctggtctcaaactcctgagctcgtgatctgcccgcctcagcctcccaaagtgctgggattacaggcgtgagccattgtgcccggtgacagattatttttatgagtgctttaaagataccattccatgcttttctggcttctgttcttgcttttgagaagtcagttttcattaatatattcttccttgcaacttttaagaactttcttcttcttgccctggttattctgtattttcaatgtgatgtatctagatgtaaatttcagctgctgtagttgggatttattgtgattttttttatctgaccattaatggactctgggtaattatcagctattatctcttcacatattgtcactttcccattctctgtgtttatttttcttaaaactccagttacatgtgcctaagaccagactcaccagggataaattgatgctcccagcttcagttccaccttacttacttgaaagtgccttccacagtctgtttgacctctgagagtttaccttaatttcttgccagcttggtaatgcagctaaaagaaagtttttctatttctacaaaattgtaagcttttttgtaccaggaagatttgtcattataactagtctgctgtattgccagactactttaggtacctcatataagtggaatcatacagtatttgtccttttgtgactggcttatttcacttactgtaatgtcctcaagttatatctgtattatagcatatgtcagaatttcctcctcgtttaaggctgaataatctattgtacgtatataccacattttgtggtgatttcatggaatagcaaccagctattactcctctactcaaaccacttcaatgggtctccatctgtgttaggccattgcactgctataatgaaatataatacctgagactgggtaatttctacgaaaagaggtttaactggctgtcagttctgcaggctgtacaggaagcatagcggcatcttcctccgaggaggtctcaggaagcttccaattatggcagaaggtgaacagagagcaggcacatctcttggcaaaagccaggagtgcatgagagatgggggaggtgccacacacttttaaaggaccagatctcatgagaattcgctatcatgacactaccaacaggatggtactaaaccattcgtgaggactccacccccacgatccagtcacctcccaccaggccccacctccaacattggggattacatttcaacacgagatttggatggagctgtattaccatctgttacggtttggctctggatccccatccaaatctcatcttgaattgtaatccccatgtgttgagggagggacctggtgggaagtgattggatcttgggggcagtttacctcatgctgttctcatgatagtgaggaagttctcaagggacctgatggtttaaaagtggcagtttcccctgctttctctctctctctctctctctctctctttctttctctctctctctctccccctccccccctttctccctctctctgtctctcctgccaccttgtaaagaaggtgcgtgcttccccttcatcttctgccatgattgtaagtttcccgaggccttctcagccatgcagaactgtgagtcaattaaactacccagtctcaggtagtgtctttacagcaacgtgaaaatgttctaatacaccgtccctctcagagtagaagccaaattctttagaaggccggtgaagcttaaataatctcattaccttttacctcctgactttatatcctactactcactctatagccacactggccttcttaatattccccagacatagtaaacatgcttctagttttgggcctttgaaccagctgctgcctcttccctgaatgctttttccccagagacttgaatgactgactgactttttcactttcttcaaatctttgcttaaatgttaacttgttaatgattcctagctctaatttcatcagtatccatgacatcccctaccctgattttctttctctgaagcacgtagtatcttctaacataaaatgaaatttacttatttatcacttattttctgtctcttctaagaaaataacatccctgaaggtaaagatctttgttttgtgatattaaaagcatcagaacagtatctggcaaaaggtaaatatttgttcagtgaatgttcttgaatgaagcagctaaaagaatggagactgtttcagtgtctattttatgaatacaggcataaaattgtaaccaactctgaccacatctctaatttcttctgccctgagatttactgatttttcttttataattctaatcattccttcttaggtttctgtatgacctgttttcagtttctcttcttgtacacttcagaactgcaaaagccaatgttcctgtgggttttgctatttaattcacatattttactttacagatgtactttattaaatgtactttctgatactcaatagaggagacattttttcttattattacttttcaggctgggagcctatatgtgagactgaagaattaaccccaaagcaggatttttatgaagaacatcaatcccagaagataatagaaacacttacaagctataaccttgaatactccagtttgagagaagagtggaaatgtgagggctattttgaaaggcaaccaggtaatcagaaggcgtgtttcaaggaagagataatcactcatgaagaacccctttttgatgagagagaacaagaatataaatcttggggaagttttcatcagaacccactgctttgtacacaaaagataatccccaaagaggagaaagtacataaacatgacacacaaaagagaagctttaaaaaaaatttaatggctattaagcccaagagtgtctgtgcagagaagaaacttttgaaatgtaatgactgtgaaaaagtcttcagccagagttcatcccttactcttcatcaaagaattcatactggagagaaaccctataaatgtatagagtgtggaaaagccttcagccagagatcaaatcttgttcaacatcagaggattcatactggagaaaaaccctatgaatgtaaggaatgtaggaaagccttcagtcagaatgcacacctagttcaacatctgcgagttcatactggagaaaaaccttacgaatgtaaggtatgtcgaaaagccttcagccagtttgcctaccttgctcaacatcagagagttcacacgggagagaaaccctatgaatgtatcgaatgtgggaaagcatttagcaacagatcatccattgctcaacaccagagagttcatacaggagagaaaccctatgaatgtaatgtctgtgggaaagcatttagccttcgtgcataccttactgtacatcagagaatacatactggagagagaccctatgaatgtaaggaatgtgggaaggcctttagccagaattcacaccttgctcaacatcagagaattcatactggagaaaaaccttataagtgtcaggaatgtaggaaagcattcagccagattgcctaccttgctcagcatcaaagagttcatactggagagaaaccctatgaatgtattgaatgtgggaaggcttttagcaatgactcgtcccttactcaacatcagcgagttcatactggagagaaaccttatgaatgtactgtttgtggaaaggcttttagttactgtggatcccttgcccaacatcagagaattcatactggagagagaccctatgaatgtaaggaatgcaaaaaaaccttcaggcagcatgcacaccttgctcatcaccagagaattcacattggggagtcactgtcaccacccaacccagtcaatcaccaagtcctatagatcctgagtcctaaatgtttctagaatttatactgttttttatctttaatgttgtcaccttggtctgattcatctcactctgattactaatatagctttcaaacaggttttcctgtatttatttttgctacctttaaatccatttcccacaatgcactcaaacggatcttttttttctttttttttctttttgagacaatgtcttgctgtgttgcccaggctggagtacagtgggacgatctcagctcactgcaacctctgactcccagcctctgcctccagggttcaagcaattctcatgcatcagcctcccgagtagctgggactatagacatgcaccaccatgcctggctaatttttgtattttttagtagagatggggttttgccatgttggccaggctggtcttgaactcctgatctcaagtgatctgtctgtctcggcctcccaaagtgctgggattacaggcatgagccaccacgcccagcctcaaagtgttctttttaaagaataagaaaacacacatgggctgggtgtgatggctcatgcctgtaatcgcagcgctttgggaggccaaggcaggcagatcacccaaggtcaggagtttgagaccagccagactaacatggcgaaactccatctctactaaaaatacaaaattagccgggcgtggtggtgcacacttgtaatcccagctactctggaggctgaggcaggagcattgcttgaacccaggaggcagaggttgcagtgagccgagatggcgccattgcattccaacctgggcaacaaggctgcaactccgtctcaaaataaaaagaaaagaagagaaaagaaaacacatgttactatctccagttaaaactttttttttttttttgcttgttattgttcttagactaatattcacagcctttaaaattgtctgcaaggcttttgttatttggttcttacacaccattcagccttattttattccagtcttcttctttgggcactaggcacttcccaggactaagagcttagattctggaaaatcatagctccaacactactatggcattgcgtgactttgagcaatttgcttatctaaacctcagggttttctttaaatcttaaaataggaataatataggatactgtactgtagaaatgtaagtattaagtgaaatagtgtctgttgtagattgatgcatattaaatgagaaatttgcatgtaaaatacttcatatagtctgtcaaatatagcagatattcaataaatgataatagctaacatgtattgagtgcccactacacatcaggcactgtcttacatactctacatatattaactcatctactcctcacaaaacaagattccttattggacaaagtggagcattcctgcaaaacaccagttcagaatttggaaaatctaaaaatgttagaacataaatggcagtctttgtactgtagcttagtagttgttatgaagtcaggtagtggaactataacactgacagccagttttaggaagtttctacagataatgaattggataagccaattaagaaaaatagaattcactgggaagaatgcagaacctacatttaaatcaaggaaggaatagaaatggtcacaattaaccaaaaaaaatcaataaacatagaaattcatgtgatccccttaaataggcaccacaccctggccaggtgcagtagctcattcctgtaatcccagcactttgggaggccgaggtgggtggattatgaggtcaggagttcgagaccagcctgcctaacatggtgaaaccccatctctactaaaaatataacagttagccaggtgtggtggcgcacgcctgtaatcccagctactcaggaggctgaggcaagagaattgcttgaacccaggagacagaggttgcagtgagctgagatcgtgctactgcaccccagcctgggcaatacagcaagactccatctcaaaaaaaaaaaaaaaaaaaaaaaaaaagcactacccccagctaattgtatggttaaattcgggtaatttagaaggcatgtaaagtgttccatactatagaaaaatgtaaagttttaaaattatttatccagtggttgcaaaattgaaatcaaaaggggattaagggaagaaaacagatagatacacaaataatataggcattcattctgttaatattgagtaattactgtttgtcagacactgttttaggtatgaggaaatgacagtgagcaatacaaaggccacattctcatggagtaaaattccagaggtggagacatgtaattaatacttaaatataaaacagtagattttctaaacgcagaaaacggaagagtaacaagaaactaaatcaaggagcattatatagcctagactgcagagactcaatataataaagttggcgattcttcctaattatcaaatttactgcaattccagccaaaatgtttcagtggttttttttgtttgttgtttttgtttttgttttgccctttagcttcacaggtttgttctgaaatttatgaggtataaattcttaagagcagcaagaaaaatttcgaatctatttgtagaaactgcatatgatgatggttcataccagtagagagaaagattggatttgggggtattactagtagtaaggggattcactagtagtaagggaaatgcaaaataaaatcacattgaactagttcaaaatcatcacattggcaaaagcattagagtgccaattactggaaagatgtggagcaataggaacactcatacggtgctataggaagtagttgtgtttagcataatttggcaatgtctagtaaagttgaagatgtgaataatctttgacccagcaattccatgtttaaacctctacatagtctctcctcgtgtttcaaggagatacatatgatggtccattgcagaactgtgagaatgagaagttgaaagcaatctaaccattaggttaaatacaagatagaatgcaaactaaaatgaataactagagatatttctgtcaacatgggtaaacctcaaaaatagtattaatgaaattgaactacagactattttatataatacagtataacgtacaatttcaaaacatgcaaattagtgttatgtatttttgtcatggctaaatactatataaaaaggatctaaaagaattaataaaataatcatcagattcagaacagtggtgacctgcagggagaaagacaactgagattggggaaaggatgcaaatgaaaatacctttaattattcatttcttttaaaaataagcaaatactgtatagccaattcttaaaatttgataaagctggctgtgagtatatgagtcagttcttactctctgtatctttctgtataaactatttcataatgcaaaaaaataaagaatatttaaatgatgtttgcttctatcagttctttttttttttttcttttttgagatggaggctcactctgtcgcccaggctgtagtgcagtggcatgatctcggctcactgcaacctccgtctcccaggttcaagcgattctcctgcctcagcctcccaaatagctgggattacaggcacacgccaccacgctcagctaatttttgtatatttagtagagatgtgcttttgccgtgttggccaggctggtcttgaactcttgacctcaggtgatctgcctgcctcgacctcccaaagtgctgggattacaggcgtgagccactgtgccctgtcagttacttttttactattcccaaggtgtgccactggtattcctgtatccaccattttcttcagaaagaagcttatatatggtctatttgcagaggcaaccattgttaacaattttaagactatctttccatgtttgactcatttgagaatgacgttttatgctaagggttttataagcctaattttcccatcatcattcttattgttttcaggaccccattgtatatgcaccatgatttgttaatttccctttgtgtactaagtgtccagaatttttgtgggccaattactatcctttctgaactcaattttctcagatgttaaagggaggtaattctttgttttagaactgttacatgcatttgtcataatacatgttaaatttacagcagtatttagtaaaagttattattttataaaatatactgggggttgtgaaaggaaacaggaagggaaatggcatgaggctgttacagtagaagcaagcggtagagacagaaatttacttcagataggcagcatacagaaacaaatacatagtaactctggattttaaaatggatgcctaacttagtcactgtgattataatcaatatccagcagaatttgttgatagcttcccatttttattatatttttctcatttataagtcaatggaaaaataagcaattaagaatatcaaggaaattgtctatcactgtcaaagagaggcttcagacatccatagctgaatggttgaaaatatcaacagaaacaggatggcagagtgaggaagagtgcttgtccaccacactccaacacactgaagtgaaagttaaagcagtagataaaaattaaaacccggctgggcgcggtggctcatgcctataattccagcactttgggaggccaaggtgggtggatcacgaggtcaggagttcaagaccagcctggccaacatggtgaaaccccatctctactaaaaatacaaaaattagctgggcatggtggcgtgtgcctgtaatcccagctactcgggaggctgaggcaggagaattgcttcaaccgcgacctgggaggcagaggtagcagtgagccgaaattgcgccaccacactccagcttggacaacagagcgagactctatctcaaaaaaaaaaataaataaataaagcccttcttctcttccctattttgcctcattcactcattcatatcctttagatagagatacttgtggaatctgagctatagcctagtgtctcttttttttttttgagacggagcatttctctgttgcccaggctggatacagtggcgctatctcggctcactgcaacctctgcctccccagttcaagcaattatcctgcctcagcctcccgagcagctgggattacaggtgcccgccaccatgcccagctaatttttgtatttttagtagagacagggtttcaccagtttgtccaggctgatctcgaactcctgacctcgtgatctgcctgcctcagcctcccaaagtgctgggattacaggcatgagccaccgcgcctggccacatagtgtctgaaagtagttaaggaaataaaaactgcctatgtcatatcgtgtgactgtgctgtataaatcctatgctcatgaacagctctgaggtgagctgtattcaccaggcagccagttattgaacatggattatagactggcaagtggatacaaaagctggtgggtgtgaagtggtactacttatgggttttatttgcatttctctaatgactgatgatgttgcacatcctttcgtgtgtgtattggccatttgtatatcttctttggaaaagtgattattcaaatccacttccaattttaaattgaattgcctttttattgttgagctgtaagaggtcttcgtatattctgaatacaagggccttgtcagatatgctatttgcaaacattttcttccattttgtagactttcctttcactttcttgatagtgccctttgaagcaaaaaataaaaaacaactaaaaaaattgttaattttgatatactctaatttatctattttttcttttcttgtttatgcctttggtatcatagctaagaaactactaatctggccaggtgcggtgactcacacctggaatcccagccctttgggaggccatggcaggtggatggcttaagctcaggagtttgagaccagcctgggaaacatggtgaaaccccgtctctatacaaaatacaaaaattagccaggcatggtggcatgtgcctgtagcctgtagtctgaactactctggagtctgaggtagaaggatggtttgagccatgattggataatgggggcggttttccccatgctgttctcgtgatagtgagggagttctcatgagatctgatggtttaaaagcagcagtttcccctgctttctctctctctctcctgccaccttataaagaaggtgcctgcttccccttcaccttccaccataattgtaagtttcctgaccttccagccatgcagaactgtgagtcaattaaccctcttgagtgaagatatctctttgatatattgatttccttttttgtttgttttgttttgttttgtttttggatgtctacctagcagtgagatgagattgctggatcgtatggtagttctatttttgtttttttgagaaatctccagttttctataatagcatactaatttacatttccaccaatggtgtgtaaggattccctttcttcacatcctcaccaacacttgttatcttttgataataggcattttaactgaggtgagatagtatctcattgtggttttgatttgcatttccctgatgattagtgatgttgagcattttttcatatacccattggccatttgtatgtctcttttgagaaatgtttactcgaatcccttgcgcatcttaaaatcagatttttttgctattgtttaagttccttatatattttgcttatcccttattgaatgtctagtgtataaatattttcacccttactgtaggttgtctcttcactctactgattgttttctttgctgtgcagaaccttttcagcttgatataatctcatttgtctatttttgcttttgtctcctgagcttttgaggtcttacccaaacaatttttgcccagaccaatttgctgatcacttctccaatgttttcttctagcagttttatagttttgggtctgccatttaagtctttaatccattttgagtttatttttatgtatggtgagagatagggatgtagtctcgttcttctgtatatgcatattcagtttttccaacaccatttgttgaatatagtgtgctttcttcaatgtatgttcttggcacctttatagaaatgagttggcactaatttcacggatttatttctgggttctctgttcagttccatcagtctacatatctgtttttatgcccgtaccatgctcttttgattatcatagctttgtagtatattttgaagtcaggtagtgtgacacctccaggtttgttctttttgctcaggatttctttggctattcaaggtcttttggggttccatagtgaattttataattacttttaatatttctgtgaaaaatgtcatttatatttttataggtattgcatttaattggtagattctttgggtaatatggacattttaacaatattaattcttctaatccatagccatggaatatcctttcatgttttggtgtcctatttctttcagcagtgttttgtagtttttattgtggagatttttctcttctttggttaagtttattcctagggatttcattgtctttgtagccattgtaaatggaactaacttcttgatttcttttttagattgcttgctgttagcatagataaatcctattgatttttgtgtgttcattgtgtatcctggaactttactgtttatagttctaagagttttttggtggaatcttcaggtttttctaaatataagatcatttcatctgcaaacaaggacaatttgattactttccttctaatttgggtgtcctttatttcattctcttgcttaattgccctgggtaggacttccagtattatgttgaataaaagtggtaaaaatgggccgagcatggtggctcacgcttgtaatcccagcactttgggaggctgaggcagatggatcatctgagatcaggagttcgagaccagcctgaccaacatggagaaaccccatctctactaaaaaatacaaaattagctggcatggtagcgcatgcctgtaatcccagctattcaggaggctgaggcaggagaatcacttgaacccgggaagtggaggttgtagtgagctgagattgtgccattgcactcctgcctgggcaacaagagtgaaactctgtttaaaaaaaaaaaaaaaaagtaaaaatggcgtctttgtcttgttccagtccttagaggaaaggcttttaatttttcctgttcagtataatagctttgggattatgaagcccctcccttcttaaggggtcacctttttaaaaacaagaggactacaccaccacccaaccacaaaaacctcctgaggaactcatttagactgacaagaggtgcagaaagaggttaaataaggtgcttataactcctttttctccttcccctaatgatagcacctaactgaacacagtccattcatgcagaaaaggagagtaatttgaggatggtattgttaactaaaaccgtagcctttatggaaaattcaccactcttgcacaaacatccaggatccacatggctattgggagtgatttctcctgcattgcctccagcctttcctaacatgtccttctctctttgtctttcatatctgtgatggagcttcattcatgtgtgtgtattcctctgtttctgtgtgtcttttgaacaagtaaggttttgcaattaaagaatgactgaggccaggcgtggtggcttatgcctgtaatcccagcactttgggaggccaaggcaggtggatcacttgaggtcaggagtttgtttttttttttttttttttttgagacggagtcttgctgtgtcgcccaggctggagtgcagtggcacgatctcagctcactgcaatctccgcctcctgggttcacgccattctcctgcctcagcctcctgagtagctggaactacaggtgcccaccaccacgcccggctaattttttgtatttttagtagagacggggtttcactgtgttagccaggatggtctcgatctcctgaccttgtgattcgcctgcctcggccccccaaagtgctgggattacaggcatgagccaccgtgcccagccctggccaatatggtgaaaccctgtctctactaaaaatacaaaaaacttagccgagtgtgatggtgggtgcctatattcccagctacttgggaggctgagacaggaaaattgcttgaacctgagaggtggaggttgcagtgagctgagatcacgtcactgcactccagcctgggcgatagggcgagattctgtctcaaaacaaaacaaaacatatatccaaccacagccatccctggccttctaattcatgttgtctgttatttcatctgtactttcccttttattctttttttttttttctgtgcttggatgccaactttatttgtggtcaatataacttagagtcttcattttccatttttgtatatattctgttaatctatggtatcatctaccaagtcttctgccttaaaaaactcacagagatcatttcctttttgtaactcatcctctactctcttcattcaattagttacatgttgtacacatgtaccttaaaacttaaagtataataaaaaataaaaaaagaaaaaaaaagaaaagtaaattatgtcattcaatgatccaatgagagactactgcaatgacaaaatagttggtttggagagagttttctggagtccagtcctttttattctttttaagtagagacaaggtttcaccatgttgcccaggctggccttaaactcctggactcaagcaatctgccccctttggcctcccaaagtgctaggattacaggcgtgagatgctgcgtccagcccctttttattcttgagtgatatccagttcttctttcactgtatgtgacttcctaagagtgctaaatcttctggcttccactgatttccattgagaagtcctttttttttttttttttttaaaaaaaactttgcaagcttctttgtttttggtttcagcagatttcttctcatcttagttatgatttccttttcattagccttttaacaaatgtggtttttttttttgaaatggagtttcactcttatcgcacaggctggagtgcaatggcacgatcttggctcactgcaacctctgcctctgggttcaagcaattctcctgcctcagcctcctgaggagctgggattacaggcgtgcaccaccacacctggctaatttttgtatttttagtagagacggggttttaccatgttggccaggctggtcttgaactcctgacctcatgatccacctgcctcggcctcctcccaaagtgctgggattataggcatgagctactgcgcccatcagagacatgtttcttgaaagtatgcccttgtcaattaaaaaaaaaaaaccaaatagcccaggagtttgagaccagtctgggcaacatagaaagactccatctctacaaaaaataaataaaattagccaggcatggcgggacgtgcttgtaatcccagtcacttgggaggctgaggtgggaggatcacttgagctcaacaggttgagattgcagtgagccaagatggtgccactgcactccagcctaagtgacagagcaagaccctgtctcaaaagaaaaagaaaagaaaagagtaatccatagtgaggatgttaggaactattataaaatcataactaatgatggtcaaatgaaatataaaaataataaaaatatattattttcatttaccaaaaaagtgtgccttcttttcatctaccagttttctaatcttccagtattttctgcaccttctgaatctcttttccttccaggaccctgatttaataaaagtaagacttaattattatataccttgtgcctgtattagcttttttctcctcattttctcctgaaactctattacagaattcatgtcctcttttccacttgattaactttttgttccctgtgtgtaatctgatctttacatccattgtccttttagttatttgaaagtaatgaaaatcaccatttggattttttttttttttttttgacagagtttcactctgtcacacaggctggagtgcagtggtgcaatctcagctcactgcaacctccacctcctgggttcaaacaattctcatgcctcggcttcccaagtagctgggactacaggcacctgccaccacacccggctaatttttgtatttttagtacagactgggtttcaccatattgcccaggctggtcttgaactcctgatctcaagtgacccacctgccttggccccctaaaacgctgggattataggcatgagccaccatgcctggcccattttttttttctacaatagtttcaatcctctgccaaaactaaaatcttctatatgtttttatatactaggtatagttattttttataagtgccatatactttaaatcagttttattgtggtatgagttatgtatgtagtttaaaataaaataggccgggcacagtgggtcacgcctgtaatcccagcactttgggaggctcaggcaggcggatcacaatgtcaagagatcgagaccatcctggccaacatggtgaaacccggtctctactaaaaatacaaaaattagctgggtgtggtggtgagtgcctgtagtcctagctactcaggaggctgaggcagaagaattgcttggacctgggaggcagaggttgcattgagcctagatggcgccactgcactccaacctggtgatagagtaagactccatctcaataaataaataaaaataaaataaaatacatcaatcttaaggatgaagtttgatgaggttggacaaacaaaactgaaagtagaatatgcccataagaaaaacctcacacatgagaatgggcagaaactggaaaggctttgagaaactgttaatgaaagcaaaaagaaagaaccttgaagaaattttttttcactgtgttaatttatttaataactgacaattttattattatcaccgttttaaagatgagacaattatagcatagaaaattcaagtaaatgccccataacaccaacccctcaacctgtttcttcttatttcctggacccttggccatatgcgtggaatctgagaatggcatctagttggctttaaactcacactaatgaagctgcaatctggaggtcaggaagtttctggaaattgttgctggtgatgaattcacttagatgcgtacatctactggtctagacatcactccactgctgaaaaaaggcatctacctcccttctttatccaaatcttatttgaaagcatatctttggcagtaaccagactgtctttaggtgacttttagcaagttgtctaggaagtgaaattgttaggtttccagcccctgaaacaaaggtaagagcgcaaaaagaggtagaaattagtgctgattagaaataaacaatatctactaccacatatagaggacagagtgggaaataaaccccataatctaaacagaggcaactactgcagctcctataaagactttggaggcaggggtaggttctatgatgcaatggtatctacgtgccagcagataacaagggctagttgcaactgtaatgtatattcgtatttcttgaagactcaccattgtgggctaagagaagttgaatgagggcctcgaacccaaaccaaagcaacatctctagttcaaagctactctgtttagatgaatctgcttatactatctgttgtttctatttgatctcattcatgtggttctgttcccttgcatgctggatatctgtgacaacttgctggtcactgtacctgaaaaattatttgtggatgctccctcaggcgtaaagtgcctccagagtgggttctcatttaccccttccaggtatcaccagtccaacccatctcaaattgagttcataatgtgaaattccttaatttactgagcttatgaatccaaagcttcccatacctggtgaaatataaaaaggaaaaaaagaaaaacagggctttaccccaggaaaatcaaaccagaatttctggaggtgcccaagaattgggattttaaaaatctctttgggtgattttaagatgtagttagaattgagaacaaccaggctgggcgtggtggctcacgcctgtaatcccagcactttgggaggctgaggcgggtggatcacaaggtcaggagttcgagaccagcctggccaatatggtgaaaccccgtctctactaaaaatacaaaaattagctgggcatcgtggcaggaacctgtagtcccagctacttgggaggctgaggcaggataatcgcttgaacctgagaggcagaggttgcagtgagccgagatcgcaccattgcactccagcctgggcaacagagcgagactccgtctcaaaaaaaaaaaaaaaaaaaaaagaattgagaacaactggagatgaaccgagtatggagatcaggtcataaaaaaggaacctctagacttaaatattatttcctaatatgatctttaattgtggtcacttatagatagcattgaccataagctaacagactagaatctactgtttttttctttttcttttcactttttaatatagaaaaaaatcagacatatataaaaacagagaaaaaatatgaatagatcatcatgtattaattacaccaattcagcaattatcagcagtttgccaatttggtgttaagaaaaattatcagctgggcgccatggctcatgcctgtaatcccaacacttcgggaggccgaggcaggcggatcacctgaggtcaggagttcaaaaccagcctggccgacatggtgaaatccagtctctactaaaaatacaaaaattagccgggcatggtggtgtgtgcctgtagtcccagctactcaggaggctgagggaggagaatcacttgaacctgggaagcagaggctgtagtgagccgaaatcgcgccactgcactccagcctggacaacagagtgagacgccgtctcaaataataataataataataaattatcaaaaactagatgtatagagcacctttgacatacctaactccatcttagaaaaagactccatttcatttttcatagaacactttgccaacaggatgttttgcttaataaacaaaaaaaaagaataaagactgcatccaaccagttaaggacatgaacaagcacattcttccatcatcagttctcaccagaggactctgtgactataaaagattagggcttcagcagcttgaaacggccgtcttaactgacactatcttgtagttactcatgataagaacttggcatctgctgtggaaggctgtgccacatcaaaaactctttcttgcaagactgatggactgcctagtccagactaggacctcttttgtctttgcccatggactggttccttaaccctttctcctatctctttttcctcttgatattaaatgttactttgttgtagaatgtttgaccaagaatgtttatatattaagtacactattggccaggcgcagtggctcacacctgtaatcccagcactttgggaggttgagacaggcggatcatgaggtcaggagttcgagaccagcctggccaacatagtgaaacaccatctctactaaaactagaaaaaattagctggggatggtggtgcctatactcccagctactcgggaggctaaggcaggagaatcacttgaatccaggaggcagaggttgtggtgagccgatatcacgccactgcacttcagtttgggcaacagagtgagactctgacccccgcaaaaaaaaaaaaaaaaaaaaaaaaaaaaaagtacactattatatatgctttgcagtattgactgacttctggagtatcttgaacctgtgtgcctgcggctctgcctctggagtgaaggggaagtactaaggagaatgcctccttgggaactccacatagctcatggcttttgttattgaactagcatcaataaaagcctgacattgtggcaagatacaagcatgtgtgcccctggatatctctaaccttgcaccactcatgaaactaggaaataaggaaaaaatattattttgttatcccatatatctttgcaaagtcatactacagcacagtctaacaaactgttctagggactggttttccaacactcagcaccgtttacattttgggccagataatcctttgttacagaggactgttctctacaacacagagtggctggaagcattcttggcctcttcccactagatgccagtagtatcctacccccatcattgtgagaaccaaaattgtcttcaggcattgccaaatgtcccctggggcttaaaactgccccaggttgagaattcattgctctggtgtaatgaacctttatttgattgactgttatttattaggatgtaggtggtgtaaaaatagatgttaacttgcagacaactgatgcatttttcatttttcttttttttttttttttttgagatgtctcaccctgttgcccaggctggagtgcagtggcgtgatctggactcactgcaagctccacctcctgggttcacgccattctcctgcctcagcctcccaagtagctgggactacaggcacccaccaccatgcctggctaattttttgtatttttagtagagacggggtttcatcatgttagccaggatggtctcgatctcctgacctcgtgatctgcccgcctcggcctcccaaagtgctgggattacaggcgtgagccaccgcgcccagcagacaattgatgcattttcatatattcatctggtatagctacaaattgattctgtgtggaagaaataaccttaaaggtatggttttattgccctgtagggatattaaatagttttatatctaactttgcaatcttattcgaagattctattgtttttcactgaagataggtatatacctgttcacttggaaatcaatttccaatgcccttgctaataagtgaaatgaatctttgaatatctgtaaaagagttaaaaattataagtttttgaaaattatactttgatacttgtttcacccattgccccggtgctcttcctgcctccacatactctgaggacaggatgggctgtggcctctcctcatcccaggctacttccacggtcaaccttgatccaggagatggtcacatcccacccagatccagagcaccctacactcatgccaagatacagccctattgacactcaggccacagcctgggaaagatggcaagaccccatctctacaaaaaaataaaaataaaaataaattagctgggcatggtggtgtgtaccagtagtcccagctacttgggaggctgaggcagggggatcacttgaggccaggagttcaaggctgcagtgagccatgattgtgccactgcactctagcctgggcaacagagtaagatcctgtctctaaaaaaaaaaaaaaaaaaaaaaccaaaaagccaaactaaaccagacaaaacaccaaaaaataaaaataaaaaaaaaacagcaacaaactgaagggggcctgcccctccacacctgtgggtatttcttgcaaggtggagacgagagactgagaaaagaaataagacacaaagtatagaggaagaaaagtgggcccaggggaccagcgctcagcatacagaggacccgcgctggccccagtctctgaattccctcagtatttattgatcactatgttgaccatctcggagaggggcatgtggcaggactatagggtaatggtggggagagggtcagcaggaaaacgtgagcaaaggactctgtgtcataaataagtttaaggaaaggtgctgtgccttgatgtgcacgtaggccagatttatgtttaactttacacgaacatctcagtgcagtaaagagtattgccaccagcatgtctcagcaaccacaaggcggttttctcctatctcggtaaatagaatgtatgatcaggttttatgagacattccattcccagggacgagcaggagacagatgccttcctcttatctcaactgcaaagagggcttcctctttcactaatcctcctcagcacagaccctttacgggtgtcgggctgggggatggtcaggtctttcccttcccaggaggccatatctcaggctatcacatgggaagaaatcttggacaatacccaggctttcttgggcagaggtccctgtggccttcctcagtgtattgtgtccctgggtactcgagactggagattggtgatgacttttaccaagcatactgcctgcaaacacatttttcacaaagcacatcctgcacagccctaaatccattaaaccttgagtcaatacagcacctgtttctgcaagcacagggttggggctagggttacagattaacagcatctcaaggcagaagaatttctcttagtacagatcaaaatgaagtttcttatgtcttcctttctctacataaacacaataacagtctgatctatttttctttcccccacaacaaacaacactcaggcccaggtaaggtcctttctgctccagagcaaggaagcgctgtgcctccttttaggccaaatttggggccctgtacccttttaaatgatgacagtgtctagggccaccacatttagttcaaggcttggacctataggcataagctcactggaacaggtgagagctgatggtcactgcaggttgggttagcccagagccttggagctagtctgcctagaggctcctttctcgaattcctctgcctagaggaatcacactgtcataggccataaatgctaatgatgaccttggcagggtcctatctttctgcagactatgataaagttctgttacttcttttctcactccctctgttccctggcccacatcattactcaatactctgaatagtatgctttttcttttaaaaatgaaggtataatttacatataataacacaaataagtgttcactttgatgagtctttgacaattacgtaggcccatgaaactaccacataaaacaagacatagaacattttcctcaccccctaaattatcttcgaagtcatagccccagccaggcacagtggcttacgcctgtaatcccagcactttgggaggctgaggcatgcggatcgcttgaggtcaggagtttgagaccagcctggctaagatggtgaaacgccatctctactaaaaatacaaaaattagccgggtgtgatggcgcatgcctgtaatcccagctacctgggaggctgaggcacgagaatcacttgaacctggaaggaggttgcagtgggccgagatggagatctcaccactgcactccagcctgggagacagagtagagactctgtctcagaaaaaaaaaaaaaaaaaaaaaaaatagcccctggagtcaactgctttctgatttataactcaatagatctgttttgcctgttcttgagtttctcatgactggagtcctacagtgtgtactcttcttttacctgtttcctctttccatgtgtactccttccccaatcaagaggtcagctccttgagtagcctctatttttactcgagtactcagtcttctttttcccaattcagttgctgagatatatttaggttctaataaattttgggtaaaatttaataatgatgctaatgatcctttacttctgaataacacagaaacacccagctctgaatccttgttgctttatttactcactgaatgattacggacaggtcacctcacccccgtgttgcagtttcttttgaagcgtgatgataacactatctttacaatgtttgtggcagtctttaatgttattccaaaatatcgccagctcttcccatcccagaattatggtaggattacatgtctgctatcacactcctgggtggccatgtgacgtctcaaagactagtgaatggaaatgacatgtatagtttttgaggcagaacgtttaattcccagcaaaagaccctcaaaggctgtctttccctcggccttcatgagtgacaatttaccagttgtggctgctttattggtctaatcctagaataagaacagcccttgaagtgagcaggccagtgatcaatcaggcatttaataggcactttataaatactcattttacttcaatattattatttttgtttttttagagacagagtctcacccaggctggagtgcaatggcacaatcttggcccactgaaacctccacctcctgggttcagtgattctcctacctcagcctcccgagcagctggaattataggcgtccaccatgccggctaatttttgtatttttagtagagacggggttccaacatgttggccgggttggtcttgaactcctgacctcaggtgatctgcccaccttggcttctcaaagtgctggaattacatgtgtgagctaccatgcccagcctaaatggtgattttaaattaattactataatcacttcaaagtgttgtcatataaaccacttatattaaatcaaatgaagcaaggacccttgacctctttgttaaattttaaaaatctagcagagccataggcctttaatttttccatcgcaaggaagaagaggaaactggtaataatctcctctgacagaataatctcgcaactttaggaactttatttaaagaattcagaaatggggttgggcgcggtggctcacacctgtagtcccagcactttgggaggtcgaggcaggcggatcacctgaggtcgggagttcgagaccagcctgaccaacatggagaaaccccgtctctactaaaaatacaaaattagcctggcgtggtggtgcatgcctgtaatcccagctactcaggaggctgaggcaggagaatcgcttgaacccgggaggcagaggttgcggtgagctgaaattgcaccaatgcactccagcctaggcaacaagagcgaaactccgtctcaaaaaaaaaaaaaaagaagaaatgtcaattgtagcattttaacacagcattgaagttatctactgatgcatagcaaattaccctaaactcagaagcttaaaacaacaaacatgtagtatcttacacactttctgagggtgaggaatataggagctgctatagctgagtgcttgtgactgtgtctctcacgcagttgcagtcaaactattggcaggggctgctgtcatctcaaggtttgactggggctgggagatgtgcttccaagggtgatacacttggttataggaaggccccagctactcccaggctattgggtggagggcttagttccttgctacctgggcctctccataggctgtctcggtatcctcatgacatggcaactaacttctctcaaagtgggggcagcagcctttaagacagaactcaaggtgccatttattatatttaatctcagcagtgacatctatcactgctactgcattctattagtctcacagtccaaccctggtacaatgtgggagggaactacataagagtgtgaatagtaggaggtaggaatcattgggaaacattttgaggtcagttattgtatcagttgctaggatgaccagttggaattaggatttttttaaaaagccattttcataagacaaggcaatcttttctagagatgttccaatacctgtgatatgcggagcactgcgctaggtggtattcaaggcaggcctgtagtgaatgctgttggacccagccaccacccctgagcaatcatatgcagaccgctggcttcttaactgcagacacctacagactcagcctaagactttcccacgaggcaggctcgaagtgctggagctttaacacctctggagtggccctaaaacaattaggaagagagatggtgtagacatatgtaagcttcatcggcctggtggttgtgaaaacttggaagtggtttctacacaatcccccagaggtcccaagctgactgagccctcattgatccagagctaatctgctcacctatgcactgtatattcgttcccatcgctcccgtctcacttctccatcccccacctaccaaataaactgcttgcactcattctttcctcaggtcggcttctcgggcaagcctccttaggtaaaaaccttgctttcaacatttcctttccattatgcgctaagaactctgatctcttcccgctgcggcagccccgccctttccttgcggctccgccctttccgtgaagtcacgcccgtccttaggctgtctctgtctccctaagagcgagtctcttcgctgctctctaactcctagagctggctcagaaagagtttcacattgccataggggagctcctaggagaggctgcacccattgcacgtaagaagcggtaaaaatgtacgcggccatcttaccaggctgccggagacaaagaaagctcagctttgatgtctgggcgccaccatgttggccacaggaggttttggcatctgagatgctgagttaagagcagagacgacatctctgtttagggatccagggacacttccttctccttgtcctaaaatagccttatcttttggtctagcaaagggcttaatcatccgttttacggcacagttttaaacatggccgccccaggtaggagtcaagtgggcgtcgccatcatacctccaattacagctttgagaaacccagaatcctgttcactggaaggttgccgggtggcggctgacagcctcaaagtcgcaattgagtctgcgcaccggccattcaggatgggacgaccttataccgcggtgaggcggcgtggcaggacgaccaatttcagattcagggcgcggatgcagcataaatgggaaggcacggtttgagaaacggtcaaacctgggactagtggaggatagtgagctgccgactacggtggccgactgggtcagctatgggtgcccgtgagggtcaatgacaagggaactgaagggttaagagattcggcgtctgagcctcgcggggcctcagtggtggcggacagaggtttgcgggagtcagtggcacggtctctgaagaagatggattgggagtgtgtgggaatcaataaatgcgagttctgtgaaatgtcttgattttcagggtgcatggggtcagtaatagtggtcttcatgggtctggggtcagttgggatttttcagacactggtttagagatctttaaggttaatgatcggagcccgagaggatcagtgatcggaggttctaagttctgtgggcagtaatagtttgggtactggaattggtgattgtggaaactttggggttcaaatgagggaggtcagtggtgatgaatgtttggagaaatgttttgggccatcggtgattgagacttacttcatatcatcggtggaggatcggagagtattaacgattggacttttgtagatcagggaatggagaatagagtcaagtgtgcttatcttaaaggtacgcctcaatgaggctcagtgattcggactgtcacttgtgggtgggagtgggactgtgagaatcaacaattgatcctcagtcgttgggatatcattggcaatcagtgtggattcatgattgggggctgtgtaatttcactggcaatcagatcggatcggtgttctttgtagttactgacctgtagtctctcctggtcagatttgaacataggggaatatcagtgactatgaaaacctctgagggttggagattggaggccagtgattgggggcactatgcgtgtctgattaggagacttataggggttggtgttgagggtcctgaaatgtggagattggggatgggaaaatcacagatttgaggctgcaagcctgcatagcgggaacacatttcactcaggtgacactccctagctgaatagcagccagttcctctccaccaaggcccatctgaaaactcttttttgaacccacaccctttttattgttctctacaataatgaaaataatttgaaaggatcgcgtgctaaacttatctaaagtaacatgttactaaagacgtggcttctattcttgttagggatctaatgcatattttttcctaatgtttcctttaaggctctttctggcaaaggtaatgacatacgcatctgtgccagcatcccaagagtgaggctggtttctggaaatccattctgactctgtgacagcggggatggatgtgaccttgcccgtggttagaaaacaaatttactgagtaagtatctaaaatgataatgtaggctgtgtgcagtggttcatgcctgtaatcccagcactttgggaggctgaggtgggtggatcatttgaagtcaggaattactagcctggtcaacatggtgaaaccctgcctctactaaaaacacaaaaattagccgggcgtggtggcgggcgcctgaggtcccagctactctggaggctgaggcaggagaatcgtttgaacccaagaggtggagattgcagtgaaacgagattgtaccactgcactccagcccgggtgacagaatgagactctgtctcaagataaataaataaatataaataaacaaaataaaataaaatgataatgtaaaagatttggctgaaagagcaaacagagtgtttagaaaatacttttatctaggctcaacttaaattatcaaaggaagagaaactagatttggaatttattgtattctgagaaactttttgccttgtcctatatattttaggcatagccatttttaacctccactaatcaattccttataaagtcctggcagaaaaaattcaagacagataaagccacaaccgccacaaaacaaaatgtaagctacttttagaaactgttcctcactgaaattaaaattgaactaatagttattaaaatggctgagatgggattgcaaataaaatggaaataagatttgaaaaaatagatttaggggatataagtgcagttttgttacatgggtatatttcacagtggggaagcctgggcttttagtgtaactatcacttgaataatgtacattgtaccaatctgataatttctcatcccttacccgcttcctaccctccctccattcagagtcatctgtgtctattattctgctttctatatccatgtgtacacattattatcttataagtgagaacatgcagtatttgactttctatttctgagttagaaaataagattttgaccattaatgaaaaagtgcaatgtcaaaacaatattttaattttaaaaaattattacgtttgatctttatgtaaccttcagacaaagcacaatgcctgtagcatcttaagaaataaaggcagctggatgctaaggcaggtaacatctttcagaacccacataggtcaaattttagttttaaaagcagatagtccctgtttttcacttgcacagaatcaaagacagatagctgcttagcatgggtgaaataataagccagggtaaggagtttgggtaattttttctccatgttgattcccttcaccacctatactgtgctcagtgccaggtttcagagcaaataattaaaaagaaattttacataaactttttattgtgatatatatgcaaaaatgtatataaatatgtagctcaatgaattgtcacaagggaatacccctgggtaatgcactcagatcagaaaacaacattctagcaccgtgccctcatgatgcccctcccagtcactactctgccagaggttccctagcttctaatcttagtattgtctgtttttgatctctaatttaatgggatattcattgggggggaggagcaccatggggagaggcaagatgtggctgtgtttaaacaaaatttccaagtttgaattgagataatttcatttatataacagatacttttccaggtcattaaatattccttgtttggccaggcacagtggcttacacctgtaatctcagtgctttggaaggctggggtaggagggttgtttgaggccaggatcttgagaccagcctgcgcaacatagcgaaactccatcattacaaaaaatttaaaaataagctgggtagtctgggcatgttggctgatgcctgtaatcccagcactttgggaggccgaggcaggtggaccacttgaggtcaggagttcaagaccagcctggccaacatggtgaaactccgtctctactaaaactacaaaaaaaaaaaaaaattagctgggcttggtggtgggcgcctgtaatcccaactacttgggaggctgaggcaggagaattagttaaacccaggaggcagaggttacagtgagccgagattgcaccactgcattccagcctgggcaacaagagtgaaactccatctcaaaaaaaaaaaaaaaaaaattagctgggtgtggtggctcacacttgtgatcctagctactggaaaggctgaagtgagaggattccttgagcccaggagttcaaggttgcagtgagctatgattgtgccactgcaccctagcctgggtgacagagtgagaccctgtttcaaaaaaaaaaattcttttcttttttttttttgagacagggtctcactctattgcccaggctggagtgcagtggcacgatctcggcttactgcaacccctgcctcccaggttcacaccagtctcctgcctcagcctcccgagtagctgggactacaggtgcccatgaccacgcccagctacttttttgtatttttagtagagacgggggtttcactgtgttagccaggatggtctcaatctcctgacctcgtgatccgcccacctcagtctcccaaagtgctgggattacaggcgtgagccaccacacccggccaaaaaattctttaaaaaaattgaggcataatacacatgtagtgaagtgggcttatctttaaggtgcagctcaatgaatttttatattacagagtcctgtaaccacagcctagatcaagatattcatcacttctaacacctggaaggtgtccttactggtcaatacctactgccaccctaggggtaactagtgtttaatatagtggattacttttgcatgcttttgaatttgaattgaattatatatctcccctgtgaatccacttgattgactcatattcactgaatttgataggattccatttgaatcatataaacgtgaagccaaggcattcataccatgaggtaattttgtttgaaattctgaaaccacatgaataccaggacaaaattctaagctgaatgccgggcgtggtggctcatgcctgtaatcccagcactttgcaaggatgaggtgggaggatcaggagcttgagaccagcctggccaacacagtgaaaacccatctctactaaaaatacaaaaatcagatgggcatggtgacaagcacctgtaatcccagctgctcaggaggctgaggcaggagaatcatttgcacctgagaggcagaggttgcggtgagctgagattgcaccactgcactctagcctgagcaacagaacaagactctgtctcaaaaaaataaaaaagaaattctaatctgaagttctggcttggccatctgagattgcctcttttctattattctccctggaagccaaaaacatacacagtgaactagaccctgaggttttaaagtgggtttctagtagggtcccattaatgaagctaacggttaaggactcttctcagtaggtagtttggagggggattttcagtcccttggtcaaaatctcttagtctttagggactgaccattgactacagagacctgaatgaagtagcgtgaaaaagagcctctctagaggctggctgcttgagggccaagacatagtggtgactcaacaaatgcagggttatctcggaggagtctgccttagggattctggaagctgctggtagattcactcccaggcagagatgcctctgtccctcacatacaacctgacaatatgggaaagcagctaacctcttctttaatcttttcatcttgctcacctttccacacacataagagattattgttttgttttggttttgattttaaataatttcagatttagaaaagttataagaataggcccggtgtggtggctcatgcctgtaatcccagcactttgggaggccgaggtgggtggatcacgaggtcaagagattgagaccatcctggccaacatgatgaaaccctgtctctactaaaaatacaaaaattagccaggggtggtggtgcgtgcctgtagtcccagctactcaggaggctgaggcaggagaatcacttgaaccagggagtcagaggttgcagtgagccgagatcacgccactacactccagcctggcgacagagcaagactccgtttcaaaataataataatactaacaataataataataatacagaaattcctgttatacccttcaccccattctgtaattaagattttgctgtgtgtgtagagactttctttttctgtctctctgtctgtaagttgtgaacatgatgaccctttactcctaatgtgtatttcctaggtaatatacattttgtatgtgatcacaataattaactaaccacaatataatgatcgaaagcagggaagttaacattgaaatattattatctgatgcatagactttatttagatttctccacttgtttcaataatatcatttatgttcattccttttaatggtccaggattctaatccagtgttacatgttgtatttagttgtcatatctctttagacttctttaatttggagtatgttctcggtcatttttttttacctcttttaactttgacatgtatgaggagttcaggccagttatttttataatttgaatttttctgatttttcctcatgattagagtcatgttgtacatctcggacaggaatactacagaagtgatcatgtgtccttctcaatgtaccataccagaaggtacacagtgttggtttgtcacattaatggtgatgttagctttgatcacttgatcaaggctatgcccaccagggttctccactataaagttatattattactaagtatgttgtagagagatattttgagatcatgtaattaacctcaaactttcatccactagagttagtatccattaatgatgcttacgtgactcaattacttctaattatggttaccaaatggtgattttccaattgtgtccttccttctgtatttattgtagaagctttcccttttcttcatctggaggatatcagtacaaaagtcctatttgcatacaaaataggaggtgcacattagacacttacaaaactgtttaaaatgttgagttagaccatacgccaaaactcagaccttctgaatcacaaagaaaacatcttgggaaattgactagttacagagaaacagttgtcacatcatgtgacaaagtgatgtctccacacagacaggaaacatctgggttccactctgggccagacagatttctgcagtgttctcagaatgaggtattggcaactaagaagacaaagaaagaaactttcagaaacgtggtaaaactgtcaaaaccacatgacatgatctatatgtgctgtaaaacctaactcttaattttgtttattctgtgacagtgaatcatattatgtattttttaatgaagatggaaaagattagatgagcgaatatggtatggtgccttcaactgagttatacccaactgtgattgattttctgtagtttttattttctgtcttgatgaaacattcagtcaaggaagttagaaaatatatatgagaagtggaaggaattaatataaaaagaaaaattaacgatctaaaaaaggaaaaaggtaaagctgataaatctgattttaataaaagtcaataatatagataaaccattagcaaaccttatcaagtcaggaggaaatgaacagatatacaaattaggaatgtaaaaaggggaataaccatattattaagaaatatttttgtaacactttcatagatttcaaaggtggcatgcaaaagattttttcagaatacatatgtaaaacttccttaagaagagaaaatgaaaagatcaatagctatgaacgattaaaatacttgaaaaagttcctgtccaccatctcaactatcaggttagataggtcaattggtgatttcttattgagccttaaagtgacttccaagtaacacactattctttagttcaagaccagcctgggcaatatggcaaaaccctatctctgcaaaaaatacaaaaattatctgggcgtggtcttgtacacctatagtttcagctacttgggaggctgaggtgggagggtcgcttgagtctggtaggttaagactgcagtgagccatgattgtgccactgcactccagcgtgggtgacagagtgagaccctgtctccagtagatagatagatagacagatagatagatagatagatagatagatagatagatagactcttccagggaatttataaaggaatacaccattacccaacccttttttttttatataaagccaacattgttgcattgattccaaaaactggaaaaggtggcatttcaaaagaaaaccatagcccaaccttcttatgaatgtacatgtaaaattagcaatatgttaaataatgcattatgactgagaataaatttatcctgaaagtgtaagttcaatattaaagaatttactaatgaattttaccatgttaataggacaagggagaataccatagccgcctcatagatgggaaaaaagtatttgataaaattcaacatctgttctggattttaaaaaacataatgaaatagaacaatttggatactttcttaacttgataagacctatgtctcaagtgaaaagtcagtagcagacgtaatggcagaactctgcttaccttcccattcaagtgaacacccttccctgctttgatttgctttcctctagagtgcctgccagtgcagttaatcagggaatgaaataagaaacagaagtattggacaagacaagaaaaaactgtatttgtagatgaaataattgtctatcccaaaagctctggaagattaaccattatagttattaaggaagttcagtaagggggctggtttaaaatgactgtaggaaaatggattaatgacttttttctttttttcttttttctttttttttttgagatggagtctcactctgtcgcccaggctggagtgcagtggcgcaatctcagctcactgcaagctccgcttcccgggtccacgccattctcctgactcagcctcccaagtagctaggaccacaggtgcccgccaccccacccggccaatttttttgtatttttagtagagacggggtttcaccgtgttagccaggatggtctcaatctcctgaccttgtgatccgcccacctcggcctcccaaagtggtgggattacaggcgtgagccaccgcgcccagcctgatgactttttttattgcagtcagtaattaaaaggatgaaaatatgccatttagaatggtaactgaaaacacagttgactatccagtaacagatgaaagagaaaattggagtacctgtgtgaaagcataaaacattgcattttgagatgtatagaaagtcttgaataaatattgaagccttgttcttggattggaagactcgacaattttaaaaattgtcagtattttcttatatgaatggacaaattcagtgcaatgttaagcaaaatcttaagaagggatctctttgccccaaattgtaacagaataattctgcagtttatgttgaagatgaaacatttgagaatatctaggacatttatgaaaaataagtaacaagaggtaatgtgctagacaaagctttcaaacatacagcttcaggagatagaggctacgacctaagaggaagaataagttgaggtagaagatactgagttcacttttgtgaaaccacaatgggtggcaatgagagatctatgaactagtttgttttgttttgttttgagacaagagtttccctcttcttgcccaggctggagtgcagtggcgcgatctcggctcactgcaacctccacctcctgggttcaggcgattcttctgcctcagcctcccaagtagctgggattacaggcatgtgctgctacacccggctaatttttgcatttttagtagagacggggtttcaccatgtcagtcaggctggtctcaaactcctgacctcaggtgatctacctgccccggcctcccaagtgctgggattacaggtgtgagccactgtgcccggcctatgatctagttttaagattgtgactgagagcatccagatgatggtatctatatggtaaaatatggcttttgagttcaaatgttagggactgataagggtgtgtaagtcacaatcacgtcacaatgctgactgagatggtgcccatcagatggctgccatgctgctagaagagtgccggactgcagggcaatactgctttccaagattgactcttttttttttcttttttaaattttgattcttgctctgtcacccacactggagtacagtggtacgatctcagctcactgtaacctccacctcccaggttcaagcaattcttcttcctcagcctcctgtgtagctgggactacaggtgtgaccaccacacccagctaatttttgtatttttagtagagatggggtttcaccatgttggccaggcaggtcttgaactcctggcctcaagcgatctgcccacctcggcctcccaaaatgctgggattacaggcatgagccactgtgcccggcctgagattgactctttactaagaaagataatgattgaccttcatcttcaagtggattctccccatagttgcccagttttagggaggaattggggctgagggaggaagggaactttgtttttcacatttccttacttcatcaggataggtggcactgattttatctgccacacttggctctgtgtgcagatgggcatccccagtaggaaaaaatctgtttttaaataaaaaaggaaaattactagactaattttaccttgttgaaggaaatcgaagcaaatattcatcatagttctaccatatgtatccaattactgtttcctgccttcatattttagtctgtatctacagctggaggtgattttagtaatctacagctggaggtgcctgtaatcccagctacttgggaggctcaggcaggagaatcccttgaatccaggaggtagaggctgcagtgagctgagatcgcaccaccgcactccagcctgggcaacaagagagaaactctgtctcaaaaaaaaaaaaaaaaaaaatgtgcacagcaaatgttacattgctcttttagaaggcaaatctgtctctgagaggcagcaagactgagaagttataaacccaagcgccacagccaggctagtcgggtctgtatctcactgctgctgtgtgctagttcttcagctctctcaggcactacgtctttatgtagaaatggagtaggactcggtttagagggcagtgtgaggaataaatgagtccatatgaggaaataaccttgcacagtgcctaagttgagatcagggctcaataactacaagctaggttttttttttctatttctatcagtttctatgatgtgtcatagttttatttgttcttcctgtgtgtgcttgttttgatttgtcattattgtacattttgttattgttattattgctgttacccaaataaatgtataattatgaggctattggaaaagttagaaaatgaacacttcgaaaatgaaacgtaaattcctttcagtcccttcactcagagaaagcaatgttaatattttcatagattcggacttacataattttaaaaatagaattatgcttcacattgtatgttatgacttgtattttctgcttcaaaatacatcacaaatgcagttccaagtcggagtacaccactccattattattattattattattattttctgaggcagagtctcgctctgtcgcccaggctggagtgcagtggcgcaatctcggctcgctgcaacctccgcctcctgggttcaagcaattctcctgcctcagcctcccgagtagctgggattacaggcccctcccaccatgcccagctaattttttctgtttttagtagagacaaggtttcaccatgttggccaggctagtctcgaactcctgacctcagttgatctgcccgccttggcctcccaaagtgctggcattacaaggtgtgagaaatggcacctggcctccactactatttctaatgcctgccttgtgttccattctgtggctcaccaatatcagcctgccaatcttttaattgctgggacaggctaggtgtggtggctcacacctataatcccagcactttgggaggccagggtaggtggattgcttgagtccgggagtccaagaccagcccgaaaaacatggtgaaaccctgtctctacaaaaaaaaaaaaaaaaaaaattacccaggtatgttggtgcacatctatagtcctcctactcgggaggctgaggtgggaggatcacctgagcctgggagtttgaggctgcagcaagccatgatcatgccactgtactccagcctatctcaaataaagaaatagataatgaaaaaaaaataaattattgttgggacattttgattgcttccagttgttttacttttgtaagcaaaggtgagatgaacatccttgtacctttatcttttattttagcgagactaattagttccttgagacacattattggatgttgaagagtggtttaatgagtgtgcactctaaaaattctgatagggctgggcgcggtggctcacgcctgtaatctcagcactttccgaggccgaggtgggcggatcacgaggtcaggagattgagaccatcctggctaacgcggtgaaaccctgtctctactaaaaatacaaaaaaattagccggcgtggtggcaggtgcctgtagtcccagctactcgggaggctgaggcaggagaatggcgtgaacccaggaggcagagcttgtagtgagctgagatcatgccactgcactccagcctgggcagcagagcaagactccgactcaaaaacaaaaaaaattctgatataaattcccttcagaaagctggaatatcctgccctcctaccagcagtgtaagagatatgatttccatctttgccaatcttataagccaaaaagaccattttaataatcttgtggaaaagacttttactaaaaatactaccagaagcagaaactataaggggaaaatatcaacaagttgactattaaaaataaccaataaaacttgtttggtatttggaaactaataaacccagtttaaggacaaatgacaaataaggacaaatgttatactataaaaacatatttataacaaatatgacaaaggattaatagcctcaatatagaaagaacacttgtaaatgaatttttgaaaataactcaggaaaatcaaaagttaagagcataaacagattgtttacaaaagaaatgcaaatggccaataaatagatgaggaaaatatctttctccattggaaatcaaagaagggtaaaataataaataaatgatagggatactgagacacagatagactaagtaactcattcaacatcacacatcagtaaatggcagagcctgcatttgaacccaggttgtctggctcccgagtctgtttgacagcctctttctgttttcacaggtgaggaaacaggcctagagaggtaaagtgtctagcccagattctctcagtcagtcagaggaattacttagcttcaaacttgtatctgagtcattccttggctcagggagtgactcagacacaagggtctttgtgggagttccccctgtcccagtcccagaacagagccatcactcagctgtctcctgcacagcctctgcaggcttttccccctgaggccccaggcagtgtttggggaaggacgattggatgactcaccatgggatctgcttatcttcaggttctctgggtgccctgcagacctttggatcctgccaccttgctggacgggagggctctctagctcctgccagcccttagagccacaggaccttggtcacaacatctacagaaggccctgcagctaagtgtgagttactgttgagagatggagctgtgagtgcctgggcaggccaggttaaagacactgtccaggagaagggaacttgggatgaaaattcccttctgaaggaatcactcagaccccatacctcttgtcagagcaaagactcccacataaaaggaaatagcttcatccctgagccagaagctgagcaagaccaaacctgaagacgttactctttccagggactctccatggctaaatgaagggaggatggttggcccaagatccaggaagacagagtgaagggagaggtagggaggccagagtctcatggcgggtgcgataggcatgttctttcaggagaagggggcatctttctagcccattgcgttctgctatcttgtggtatggggtgtggcccatctgcttctttattcttgctggacctctctagacttgctctcccgtcatttttggcacctcacctggcctctaggaatgtgattagttcactccatcctgactcagaggcagaaatggccctggattctcagaatggtggtggtggcagaatttatggacctactgtatataattttgttttgttttgttttttgagacggagtttcactcttgccacccaggctggagtacaatggcagaatctcagaattacagacatgcaccaccatgcccggctaattttttttttttttcgagatgaagtctcactctgtcgcccaggctggagtgcagtggcacattctcggctcactgcaagctccacctcctgggttcacgccattctcctgcctcagcctcccaaatagctgggactacaggtgtgtgccaccatgcccggcttattttttttatttttagtagacacggggtttcaccgtgttagccagaatggtctcaatctcctgaccttgtgatctgcccgcctcggcctcccaaagtgctgggattacaggcgtgagccactgtgcctgtcctgatttttgtatttttagtagagatggagtttcaccatgttgaccaggctggtctcgaacttacgacctcaagcgatccacccacctcggcctcccaaagtgctgggattacaggcatgaatcaccatgcatggtcaattctctttttttttttttttttttttttgagacagagtttcgctcttgttgcccaggctggagtgcaatggcgcgatctctgctcactgcagcctccacctcccaggttcaagggatcaagggattctcctgcctcagcctcctgagtagctgggattataggcacgcttcaccacgcctggctaattttgtacttttagtagagatggggtttcactatgttggtcaggcttgtctcgaactcccaacctcaggtgatacacctgccttggcctcccaaagtgctgggattataggcgtgagccaccgcacccagccttttgtttttaactaaacattttatttggaaatttttttccaaaaaaaagcaagaatatttctgtggtctcctatgtattccttacctagattcatctatataaagccatgtttgcatgtcctctctttctatatacaaatatatatgtatatagataattatgttatatcataaatatatcattcctattctttctttaactacttaagactaacttgcagacatgatgctcctttacccataagtacttcagggtatattttctaagaataagaacttttttttatgtaaccagtagttttcaaaaccaggcatttgacactgattacaaagtcagtgttataatgatttaataatcatgataactagattaatgtagaccatagactagattaatccagtctacaatcagatgtcaactaatactgtcactttatagcaacttttctttcttgctttttcttattttttgagaccaagtctcgctcttgtcacccaggttggagtgcaatggcgcgatcttggctcactgcaacctctgcctcctgggttcaaatgattctcctgcctcagcctcctgagtagctgggattacaggtgcctgccagcacacccggcaaatttttgtatttttagtagagatggggtttcaccatgttggccaggctggtctcgaactcctgacctcaggcgatgtacccacctcggcctcccaaagtgctgggattacaggggtgagccactgtgcccgggcctatagcaacttttcttttctttttccattccaggatctaatccaggatcatatgctgcctttaggtgacacatccctttagtctcctttaatcaggagcagtttctcagtgttcatcttccatgaagtcgacatttttgaagagtataggtaggttattttgtatattgtaactcagtatggttttgtctgatgtctcctcattgattaggttcaggtatgcatttggggtgtgaacaccacagaagggatgttgtacccttcacagtgcattatatcaggaggcacatgatgtcttatatctcattactggtcacgttaactgatcacttgactaagtgatactgccaagtttttccaaggcaaagttacttcttttccttttataatcattaaatgtcttggggtgtggggcatttagatactatggcaaccatgctttatggtctatgctttatgacctatataatatttcaaagtatttgaaacaaataagagataaagggtatttatttgtttgtttatttatttatttaatttttgagacagggtcttactctgtcacctaggccagattgcagtagtgggatcatggctcactgcagctttgacctcctaggctcaagtgatccccccacctcagcctcctgggtagctgggactataggtgtgcaacaccatacctggctaattttttatctttttttgtagagacggggctttgccatattgcccaggctggtccctaactcctggcctcaaataaggtgtaagccaccacacccagctaaaagcatggatttttgtacaatatttacaaagggaatttgcaatttccaagacaggcctagctctttacactctgttctctgttctctctttctccatcttcttccccccacatgtctacaggtgtcagatctttttcaagaacagcagaaaatgatcgaataccaggtaagtatcacattaagtagcccagttttccttcctggggaaactgtcctagaggaaaaaaagggtgtgcattgtaagtatgtacagtttgtacatacaggctgggttctcagggaagctgactcatagatggagatttttctcacaggaggttgattaggcaggctcttagaacacctgtaagacagtgagggaagctggattgggctgagggaattgttgaacagaggccttagtggatcttatcctctggagctgggatggccttcagcattgttgtgaatggaggcaaggaggcttttatattctgaaatcaactaatcattgattgtaggctgccccgaggagggtagatatccttggatggtgcagtaccctttggccaaggataattctcagaaaggttttaagccggccgctaggggtagctcatgcctgtaatcccggcactttgggaggccaaggcagttgcataacctgaggtcaggagtttgagaccagcctggccaacatggtgaaagcctgcctctattaaaaatacaaaaattagttgggcatggtggtgggtgcctgtaatcccagctactcgggaggctgaggcaggagaattgcttgaacctgggaggtggaggttgcagtgagccaagatggcaccattgcactccagcctgggcaacaagagcaaaactccatctcaaaataataataataataataataataataataataataataataataaagggttttaagcctgcaagagcctcctttctatatgtagatacagtggcaagatacttaacacatactgctgtaaccaacatgttatctttattttttgtaaagatggggtcttacttaaaaccataccatttttttaaaccagatatgtaatgcttcatcgtatgcaagggaatatgactgatttgaccagtccctcatttgatggacatttgggtaattttcagacttgatattacaagtagtgatgcaaggaacattctcttttggattaccaatgtacaaagtggagagtccaagagtcagtaactgatcttcctggtagcccaacaaaaaggcaaatacagttagcccaagatttgtactgtttataaggaagaagcctattgttatctccagtggaaaattagcatttcaaggcagtttttgaaggtgttttccaagacgccttcttaggactgaagtagaaaagcacagcctctcacagtgtggtcccgggacctgggcgtctcctgggagcctgtgggaaatatggaacggcaggctccgcccctggcctgcttcatggggtgatttgtaggtgtagcctgggaatgtgtgtttaaaaggctttggatgatctttacgcacataaaagtatgaaaaacattgatagtgatagtagacaaagttcttaataactaataaatccgaaataggttttttatattgtttccccttggaatagagtgttagacccaaggcagaactcccagtttttcaggtgaccaaaactgccaagtgctagctccccaatgatacgacaatgttttctatctgtgtcaaagctgtaggaagtcctaactcttctgttgcttgcgatccacatatataatggaaggaaatgctgcatgtcagtgagaagaaagtgaaaatacaaatgatttctttctgttttctctcttttttttttttttgagttggagtcttgctctctgtcgcccaggctggagtgcagtggtgcaatcttggctcactgccaactcctccttccgggttcacgccattctcctgcctcagcctcctgagtagctgggactacaggcgcctgccaccatgcccggctaattttttgtagttttagtagagacagggtttcaccgtgttagccaggatggtctcgatctcctgaccttgtgatcctcccgcctcggcctcccaaagtgctgggattacaggcgtgagccaccgtgcctggcctttttttttttttttttgagacggagtctcgctctgtcactcaggctggagtgcagtggcacgatctcggctcactgcaagctctgactccctggttcaagcgattctcctgccttagcctcctaagtagctgggactacaggcgcccaccatcaaacccagctaacttttgtatttttagtagagacagggtttcgatggtctcgatctcctgacctcgtgatccacctgcctcggcctcccaaagtgctgggattacaggcgtgagccaccgtgcctggccaataggaatgatttctgtttaaggggtcagagggctgcttcaagtgtacagaagccctgaatttgatccaaggcagctgtagccttgatctggactgaggaacagatgtactgcccagcatttaaatgactgtcattcttcttatatgtgtgttctagtttggtagcaaacagttacacatcttattcctgggaatgtctcagtgtgaggtgttcccagcccccaagggccctgtgtcctgagaagacttctcctttccctgagtttctcattcctgcctcctcctccatcccttctcagtttcccatcacaggagatggtgccatcccatcgggcaggccgggaccctgagatttacccttgacttcctccctacttttccccctccttctacccagtcaccatgccgtgctaatttttaaaagttcagtgattctttttatttttttgaaacagggtcttactcactggagccttgaactcctgggctcaagcgatcctcccatttcagcctcccgagtagctgggactataggcgcatgccactatgcccagctaatttttttattttttgtaaagatgggatcttactatattacccaggctggtcttgagcttctgggctcaagtggtcctcctgcctcggcctcccaaagtgctgggattacaggcatgagctaccacacctggccacaacttcagtgattgctgcctcttcattcctgtgttctgtggaaatggcatggcttcctgggtgcagaattgtatcttttcctgggaaatattgacccagagcctgtcactgtgccctgtgatcagccctgactgctgctcttactaccctggtgtgttgttctggcatcagggagggtgtttgcttggcaccccctgtgcgctgtgccctctatgtgagtcttagtgtgtcatgtgccagcctccatggcccctgccctgcttttggtcctgcctttaggcccatttgcctgggctactactgctcaggtgctgctggaagcccagcattcctcatggaggtctgcagcctcctgagaatggggcgtgggcctgggctgctctcagagccacttcggtgcttctttccttcggccactcctggaggtggtaggccagtggccccagcactgcaatagagctacctaccctacttaaagcccactgcacaggcactgagtccccattttttgtcctttagaattgttttcctttctttttttcttttcttttgagatgttgtctcgctctgtcgcccaggctggagtgcagtggcacaatctcggctcactgcaacctctgcctcccaggttcaagcaattctcctgcctcagcctcctgagtagctggaattataggcatgcaccatcacgcccggctaagtttttgtctttttggtagagatggggttttgccctgttggccagggtggtcttgaactcctgacctcaggtgatccacccgcctatgtgctaccaccctggctaatttttgtatttttagtagagatggggtttcaccatatcggccaggctggtcttgaactcctgacctcaggtgatccaccctcctcagcctcccaaagtgctgagattacagccattaagccaccgctcctggccagaattgttttccctttcttacagatttcaaaatattgatttatatgatttttcttcttaaataaaataggcaaatttatataatggtattatgtgccaggcactgttcaaaggctttacaccttttaactaatttaaacctcatagtaattaagacacacatactattattatttccattgaacagatgaggaaactatggcacagagaggctaaatagttttcccagggtaggctgagctgatatttgaactcaggcagtccagccccaatccactgctttgcatctcatgttatgtggtcacatatagttagggagcagtccacaagaccctcacttctacaccaactgcaagtttgagggtctccctcaaaacacttttgggttttctaatttactagaaggactcatagaactcactgaaagctgttatactcattgttacaattacagcaaaagcatacagattaaaatcaaccaaggccctgtgcagtggctcacgcctgtaatcccagcactttgagaggccaaggcaggcggatcgcttgaggtcaggagtttgagaccagcctggacaacatggtgaaaccctgtctctactgaaaaaaaaaaaaaatacaaaaattagctgggcgtggtggtgtgtgcctgtagtcctagctactcaggaggctgaggcaggagaatcgcttgagcccaggagacggaggttgcagtgagccgagactgcgccactgcactccagcctgggcaacacagcaagactccatctcaaaataaattaattaattaattaagtaaaatcaacaaagagaagaggctcatgaagcagagtttaggagagttccacacatagaacttctgtcctctcctatggaagtcccaaacagtgctaaatcctcccagcagtaatgtgtgccaatacagacggagccttgccaaccaggaaagtgcacctaggccctggtgtccactttttattggtggttgatcatgtagaaaggcttgactgttcccaccactgacctcagtttccagcccttccaagaggttgagctgatgcctgtgacccaaagccctcattataaaccacatcattagactatctagtgtggcccaagaccactaggtaaacaaggacactcttaggacattccaagagtatagagattactttccaggagctgagggcaaaggccacacctctcttttggcaaggtcaaattctttaccacacagtcacttaaagacaggatcaccaggaccttcctaggctggtacccatgggtctccctcagtgactgtcctgctccttcacaacttatgctggcatctccagggctatcagctctttagagaacttttgttctctgtgcccataacccgaggcctgccaggcggtcaagacttcttcttttcagactattcctcctttggatctcctgctgaactcatcttctgctggcttcttaaatattagtgtcccttggagctctggcctgggcaccctgctctccccgtcttgcagaggaatctcacttttgtgctgatgctcagcattttagctccattcctgatcttgctcctgacacaaaacccacatgtccacgtggtccccaggcaggtccagcacaacagcctcctctttgttcctcatggtttcctcatctccaggtgtggcgccatcatcacccggttgccttcaagatacctgggtgttgccctgcccctaccctctttccctcccacaaccagttaaggtgcaggttctgctcttctttttgttttgttttgttgttttaatttttaaaaaatgtttgtgggtactagtaggtgtgtgtatttatgggcatatgttttggtacaggcatcatgcaatgtgaaattatcacaccatgcagaatggggtctgctcttctttacagcgttccatctttctctaacggttactgtcctgcttgtgaacatcacctttcacccaggttactatagggtctttcctctcacgtccctccaggtcacccaccacacttctctttccatccattgactttaaaactgcctgtgagtttacattgaaagtgcatctcttgtaggcagcatttttttttttaattcagtctgatgatctctgcctttttggaatgtttagtctgagacagagtctcattctatcacccagggtagagtacagtggcactatctgggctcactgaaacctctgcctcccagtttcaagcgattctcctgcctcagcctcctgcgtagctgggattacaggcacgcacaaccacacctggctaatttttgtatttttagtagaggtaggattttgccatgttagccaggctggtctcgaactcctgaccttaagtgatctgcctgcctcagcctcctgaagtgctgggattacagtggtgagccaccatgcctggcctggagtgttcagtttatgaaggggtgggttgcccctccacacctgtgggtgtttttcgttaggtggaacgagagacttaggaaagaaaaatacacaaagtatagagaaagaaataatggggcccagggtaccagtgttcagcatacggaggatcccgccagcctctgagttcccttagtatttattgatcattcttgggtgtttctcggtgagggggatgtggcagggtcataggataatagtggagagaaggtcagcagataaacacgtgaacaaaggtctctgcatcatagacaaggtaaataattaagtgctgtgctttagatatgcatacacataaacatctcaatgccttacagagcagtattgttgcccgcatgtcccacctccagccctaaggcggtttccccctatctcagtagatggaatatacaatcgggttttataccgagacattccattgcccagggacgggcaggagacagatgccttcctcttgtctcaactgcaaagaggcattccttcctcttatactaatcctcctcagcacagaccctttatgggtgtcgggctgggggatggtcaggtctttcccttcccacgaggccgtatttcagactatcacatggggagaaaccttggacaatacctggctttcctaggcagaggtccctgcggccttctgtagtgtgttgtgtctctgggtacttgagattagggagtggtgatgactcttaaggagcatgctgccttcaagcatctgtttaacaaagcacatcctgcacagcccttaatccatttaaccctgagttgacccagcacatgtttcagagagcacggggttgggggtggggttatagattaacagcatctcaaggcagaagaatttttcttagtacagaacgaaatggagtctcctatgtctacttctttctacgcagacacagtaacaatctgatctctcttttccccacaatttatattaaattacattacatataatctttattaaattacattattggtatggttggatttgtatctgtcattttagtgtctgttttctgtttatcccgtctactcttttgttcctctatttcttctttcctctcttttgttgtgctagtgtggatgaatggaacatttttcaaaattctgtttatttagatcaggcacacctcacattatgattttagtggttacttcagggatacaatatatatcttacttttcacagtttatttagagttatcattataccacttcacatagaatgcaagaagctcacctcatgccttctagaatatactttctgcatacacttcttcttggatggagtttccattgtcctaaagtccatcatttcttttttttgtttgtttttttttgtttgagtcagagtctcaccctgtcctccaggctggagtgcagtggcacaatctcagctcactgcaacctctgcctcctgggttctagagattctcctgcctcagccacctgagtagctaggactacaggcgcccgccaccacgcccagctaatttttctatttttagtagagacggggtttcaccatgttggccaggctggtctcgaatacctgagctcaggtgatccacccacctcggcctcccaaagtgctgggattacaggggtgagccactgtgcccggccctaaagtccatcatttcattgctggccgacctctgcatacttttctcttgttactaagtaacttgccacccctaaaatcaccgttttgccccccggcctttgttcccactgctcccctgcatagaatgcagttttccatcttcctgcggaggagagtcagctttccatatccctgggctctgaagcctaaccagaacctgaaaaatttaacagaccattcgcttctctgtatgccatagcctagatgtcctgccatcacagctcttgtgacatttttaccctgatggctttacatgttgctctctctgtgccagacagtgagctccttgaggtcaggacccatctatgactgtgaccccagcaacacacagtgggtcttcaatgtttgttgactcaaagtatggatggcaatggtagatagcttccaatgtgattttctttttccccaccatatataacacaaagccaagaatataaaaggccttccagatagataataagctctaacttataaacattataaaaatcagcaccatctcttgcacaaaattttttttttttttttttgagatggactcctgctctagcccaggctggagtgtagtggtgcgatctcggctcactgcaacctccgtctcttagattcaagtgattctcccacctcagcctcccaagtagctgagattacaagtgtgcaccaccatgcctggtgaatttttgtatttttagtatagacggggtttcaccatgtttgccaggctgatcttgaactcctgatcctcccaccttggcctcccaaagtgctgggattataggcatgagccaccatgcctggccctgcacaaacattttttttcgacatgactcaatgtcatttttgtttcaacagatacctgtgtcattcaaagatgtggttgtgggcttcacccaagaggagtggcaccggctgagtcctgctcagagggccctgtaccgggatgtgatgctggaaacctatagcaacctcgtctcagtgggtaagaacatcctcaccatacaatgcagattatgttcgaatgaccacctttcctttctcagttgctaaaagcaactggagtactttgggaggccaaggcaggtggatcacctgaggtcaggagtttgaaacctgcctggccagcatggtgaaaccctgaaaccccatctctactaaaaatacaaatattatccaggtgtggtggcgggcgcctgtaatcccagctactcaggaggctaaggcaggagaattgcttgaacccgggaggcagaggtttcagtgagccgatattgcaccattgcactctagcctgggcaacaagagcgaaactgtctcaaaaaataaaaaataaaaaaaaagcaacggaagtactctagaacttctgaaatatttatttaataattatctagcactttctatgtgccagaaattgttttagccactttaaaaatattaactcatttcattctcataaaagccttatgaggtagttactattagtaccacttttttacacatttggaaattgaggtacagagaggtgaagtaacttgcccagagtcacccagctagtagatagcagagtcaggatttgaacctcagcattctggcagcacagaatgcattcttaccttgtgctgctgcctcagtgggtgtggcttgagtttccatggtcctggattactaatcccatttggttctggacaaggtgtgtgtttagtcccctcccaagtataacatctattgtgcagcctttaaagctgcctgagaggccctgaagaccaaggagctcagcccaagacctgcatcaatttccccggaacaggttatgaaggcaccaaaccagatgtgatcctcagactggagcaggaagaagcaccatggattggtgaggcagcatgcccgggctgccactgttggggtaagtgtgataaatctagcaaaaggggtactgaaggaggctggcacctttggaattttgttcagcattcttctcttaaaagccttgaaagtcctccgagagcttcagccacgttaatgactcttcaacctccatgcaaccccaccgcccatatctgagtgtttttctcggctctacttgattgcacctctgcccttatgtgcttggtccatctctctttctccagaatctttcccatgcaggtattcttacaaataaaagcttctatgattctcctgttcctgcttcctattctctgttgtgacaaactttccagataaaatgcttcagagctacctgctttccctaatttctgcactcaaatttaaatcactcccatagacagatgactgtgggatcagagaagaggaagcagtgaattccatgttggggtggggaggtgtgaaggaaatggctgagctgggcccatcttaaccactgctgattaaccctcagactcactgcccctctcccttcagctctgtaagacattccagcaatatccattgtaccctgagggctgatggatggcccactcttagggatgcctctgaacttctgcttctggcgctctctggagtgtgttcctccattaaactgtgctcttcagctgtcctgagactgtggtatcccggttatcagttgccctcctcttcttttcttctcctcttctgaaaatttcgtaactgcaaattccacaagaatgtatctagtcagcctcccgtttttccagctactctgttactatctatttccctggctcaaacccagcattttccttccaaggaacaattgcattttctgttttccataacttggttctctttccagtggtgtaatcctctcaaagaactcacccattctgagagtacatgattctcacaaccagcccttttgccatgttgggcccttttttcccccttgcactgcccacccccgcatttaaccagtctgtggattacactacaggtgtgcacttaccctgttctttgtgtgtcaaaaactaaaatcatctttatttgtccttgctacccctgccacacacacactcacactcacacacacacacacacacgcacacacacacaccacttcatcttgcttattattccagggctttgctaccgtgtggtcattttgaatcttctgcctttaccactcactctaactgttccattcatatgtgtggttttgttgattttttttcttctgagaaatggctttaaatcttcctctctgctttttttttttctttttgagacagtgtctcactctgtcacccaggctggagtgcagtggcatgatcatggctcactgcagccttgacctcctgggctcaagcgatcctcccacctcttaacctcccgagtaactgggattatattcacgtgctaccacacctggctaattttcattttttttgtagagaaggggttttgcagtgccgctcaggctggtctcaaactcctgggctcaagcagtccacctgctttggcttcccaaagtgctggatttactggcatgagccaccatgcccagtccttctccacttttttttgttgttattgttcagatgaagtcttgttctgtcacccaggctggaatgcagtggtgccatctcagctcactgcaacctccgcctcctgggtttaagcaattctctgcctcagcctccggagtagctgggattacaggcacgtgccaccacccccagctaatttttgtatttttagtagagatggggtttcaccatcttggccaggctggtcttgatctcctgacctcgtgatccacccgccttagcctcccaaagtgctgggattactggcgtgagccactgcacccagccccacttttaattttccactgatatctcctaaaatgagacccagattatctcatgactgaatgtctttaagtgaggggttattaattatttttgtgccatggacttcttaggcattcttttgaaggctatagacctcacttctatgtataaaaatataataacgttcataagattataaaataaatgactaaagtacagtaattatcaaaataagctagaaaatagttatcaaaaaaaaatttttttttttttagatggagtttcactctgtcgcccaggccggagtgcaatggcatgatctcagctcactgcagcctcctcctcctgggttcaagcgattctcctgcctcagcctcccgagtagctgggactacaggtgtgtgccaccacgcccagcttattttctatttttagtagagactgggtttcatcatgttggtcaggctagtcttgaactcctgacgtcagatgatccacctgcctcggcctcccaaaatgctgggattacaggcgtgagccaccgcgcccagcttcaaaatattttcaaaatgtgcaatataatagtagatgtactttttcatttatacgttaatgaggcctagcatcaggtctaataactgtcatgatctcaaagaagagatgattataaacataataatgtgacatgaaaataacaatattcacaaactagtatcaagtcacaggaaccactaataccactgtgttttgttgcttatattcatattcaaaggaaatgttcaattgtagttggaactcagtgaaaacaaaaatgtaatttcttttctatcaaagttcacaagccccctgttttctgccaagttaagaactcttgcttaagtcctagttagctttgttgattttattttttaatctgtttcaccttagagtgctttaccgtttatattgtaactaactagcccaacatgatattcccttggatgactgctataccagtgcttgttaagctccaaggtgtttggaatcaccggggcatcttgttgaaatgcagagtctgattaagtaggtctggggcggtgccttagattctgcacatctaacaagctccaagtaaggccaaaattgccacttgaagacccacatgctggatagcaaggtactgtataacatttaaccttctttcttctgtaacagggatcagcaaactgtggcctaccgattggccacctgctttgtgaataaagttttattagaacacaaccacattcttacgtttacatgttgtctatattttcatggtatggcgggagagttgagtcattgtgacggagaccatatggcccacaaagcctttactttctgactccttaagaataagtttgccaacctctgctctgtaatatcctattttctttgaaattattggtctctatactctatgatatattgaattccatttgtgccagtgttcagaatcctctttactcatagaacactcttccctgcgtttgtgctttgggttatggttcatgttctctatttgtgtgctgtgcactctttaaattttgagagcatttcttaagtagtatgaagtttcataaggatgattcactgtactttctccagaagacatctggcgagttaatatccagaggaaaagacggcaagacatgcttttgaggccaggcgcagccataagcaagaaaacattgcccaaggagaaaagctgtgaatataataagtttgggaaaatatcacttctgagcactgatcttttttcttcaatccagagccctagtaactggaacccttgtggaaagaatttgaaccataatttagacttgattggttttaagagaaactgtgcaaaaaagcaagatgagtgttatgcttatgggaaattgcttcagcgtataaatcatggtagacgacctaatggagaaaagccccggggttgcagtcactgtgagaaagctttcacccagaacccggcacttatgtataaaccagcagtaagtgattctctcttgtacaaacggaagagggttccacctacagaaaaaccccacgtctgtagtgagtgtgggaaagccttctgctacaagtctgaattcattaggcatcagagaagtcacactggggagaagccttatggctgcactgactgtgggaaagccttttcacataagtcaaccctcatcaaacaccagagaattcacactggggtaagaccctttgaatgttttttttgtgggaaagcctttacccagaagtcacaccgcacagaacatcagagaacacacacaggagagagaccctttgtctgcagtgaatgcgggaaatcgtttggtgagaagtcatacctcaatgtacatcgaaaaatgcacacaggagaaagaccgtatcgttgcagagaatgtggaaaatccttcagccagaagtcatgcctcaataaacattggagaactcacacaggagagaagccctatgggtgcaatgaatgtgggaaagctttctaccagaagccaaacctcagcagacatcagaaaattcatgctcggaagaatgcctacaggaatgaaaacttaataattgtgggaaatacttgagcaaaatatctggtttcatggtatgtagggaattttttttttttttttttgagttggaatctcactttgtcacccaggctggagtgcagtggcgcgatctcggcttactgcaagctctgcctcccgggttcacgccattctcctgcctcagcctcccgagtagctgggactacaggtgcccaccaccatgcccggctaattttttttttgtatttttagtagagacggggtttcaccgtgttagccaggatggtctcgatctcctgaccttgtgatctgcccgccttgtcctcccaaagtgctgggattacaggcgtgagccaccgcgcctggccggtatgtagggaatttatccttaggagaaatcttatcattttaatgaatttgaacagtgtgtttttattttatttatttatttattttgagttgtattctctgtttcccaggctggagtgcaatggcactatctcggctcactgtaacctcagcctcccaggttcaagcagttctcctgcctcagcctcccaagtagctgggattacaggcacctgccaccacgcctggctaatttttgtatttttagtagagatggggtttcaccatgttggtcaggctggtctctttggctaggctggtctcgaactcctgacctcgtgataccccccaaccccccgcccttggcctcccaaagtgttgggattacaggcatgagccaacgcgcccaaccgacagtgttgtatcataatggaaatcatgatctaattgtgatacaaacttttctagaaaatactttctcaaacataagcatggacaccctggcatgtaaacgtttaaaaatgtattaaatggaataacagcagaatacaaaatatctgtgaagagacttaaaggcatactctggtatattccacagtgagccatacaatcagcattatttgtattttggagttgtaaatgtgaaattaacataaaatgtgaatatcagacacatgtcacacaacatatagaatgccattcagaaaacttttccactttaaatatcatcattgtcttttgatgtcttaacaatacaaaaaaataacaacaacatggcccactattgttaaaagaactttattataccagctacatttttccacctttttgtaatacatgtaaatggctatagaggttgttactgtcctctgcagaaataataaagcagtgtttttaaatgtatttggataatttggccaaaaattttactaaaatgtagttatttatattaaaaatgcaagctaaggaatagtttaagaacctgatactgggtaaatgaaacactgtaaactatttgacaaaatgtagtgtcaccctggtgtacagtacactgttcatattttcttagtcttgcttaaaatatcttgtagcaaattagtagcattgctacactattctagatacactattctatatacaggttgtataactcagaaatgtttcatgcgtagaccactgaaggagaatttcttttctctctatccctctgcaaattaattcaagaatattcatttttttcatataaatttccttgcaagtgtcctagacactaaatcccaaggttttaattatttcaatgtttggaaagaagtctgcttccctgagttgctatgtcatccatattagaaaataaatggccatgtggaatctacatttttcaagatttccctccatgtaagactgcctgatccagaatgagaaaggagacataaccacagatatcaatatgattttttaagtgataaaaagatacctcatacaactctaatcaacatattttttaaaaagaggaggtggatgcttttctaataaacttaagttatgaaaactgcaataagaagtagaaaacttggtaggatagttaacattgaaaaactcaaaaaagctattaaagatctataatgggaaaatgctccaggctcagaagagttcatgcttagttctatcttttaaagaaagagtaataccagtgttatttattatatggatgtaatacaatccatgaactgtactcatttattttattaagtcagaataaattttaacaccaaaatcaaatacagatagttgaaaaaagaaaacttctgctgggtgcggtggctcacgcctgtaatcccaacactttgggaggccgaggcaggtggatcatgaggtcagaagttcgagatggtgaaaccccatctctactaaaaatacaaaaattagccgggtgtggtggcacacacctgtagtcccagctacttgggaggttgaggcatgaggcaggagaattgcttgtacccaggaggtagaggttgcggtgagccaagatcgtgccatccagcctgggtgacaagagcgaaactccgtcaaaaaaaaaaaaaaaaaaagaaaacttcagaccagtcttactcatgaatatagaaacaaaaattatagttaaaatactagcaaatagaattcagccatatacccaaagagtgacatagtaagagtcatcccaagaatgccaaaccagttcagttaataggaaatgcatcaatcaaattaacagtttaaaggagaagaatcatatgaactctcaacagatactgagaaggcatttcatagaatgtgttaatttacattgtaatagatgggaaccacttaaagcggtttttcttaaaaaaaattttttttaacccaaaccccaaagcatatattatgccaaagccattttttaaaatcaggaattcaatattggcttagagattccagtgaaggcaataaaaagaaatgaattggtataaacagcagaaaaggtaaaactatccatttttactgatgatatggttgtacaccaataaatgaaaagactattttttgagttaacttttctaagaagacagggtaccaaaatcaagagctgttctccatactgacaagaaaacataatttatatgtacttcttttggaattacactaaatctcaatgattttttgacaatcattgaaaaaaatatatgaaaaaaatcataccatgtataaaaacatcacatgtacccaataaatatatacaacaattatatatctataataattaaaaatttttaaaatgccatgctagataccagaagataacatgaagccattctaatgaaattaatattgtattggcaaaggaacaggtaaatacatcattagaacacagtagaaaattcagaaatagacttcgatatatatgaactttttcatatgtgaaaaaggtgaaatctgaaaccacaggggaaaagagtagtttacttaaaaagaattctggaacagaaccttttaatcttaaaggaagaaaatttggattaacagcacaaaaataaattctgggtggctttaagacgtaaaattttaaagcaacagaattcttaaaagaaaatcaaaggagcctatgtgtacaatctaggagttgggagatattaactttaccaacacaggacactcagaagctatttagaaataagcagttgaaggctgggtgcagtggctcatgcctgtaatcccaacactttgggaggctgaggcaggaggatcacctgaggttaggagttcaagactagtctggtcaacatggtgaaaccccatctccactaaaaatacaaaaattagctgggtgtggtggcacatgcctgtagtcccagctacttgggaggctgaggcaggagaatcacttgaacctggaaggcaggggttgaagtgagctgagattgcaccactgcactccagcctgggcaacagagcaagactccatctcagaaaaaaagaaaaagaaaaaaaaaaggaaacaaacatttgactacgtagaatcttttggtacaatcttttgggtgacaaaagatgccatcagcaaactcaagagataatagattgtggggaaatatttgtaaagctgatcagagagaaggcattcatgaaatggacaggaaaaaaacccaatagcaaaatgtggcaaagaatatgagttgacagttgtgagaagagcaaatctaagtggccaatggacctgtccaaaaatgtttatcctcagtagtcactgggggatgcagatttaaagttaaaatcaaataacactgtgtaacagcatttttagctatcagaacaaaagatgttacacactgctggtggagaaataaattttgaaaaacaatgcaaattactgttttggaaagaaatctggtaatatttaggctgggcgtggtggctcacacctgtaatcctagcactttgggaggccgaggcaggcaaattgtctgaggtcgggagttcgagaacagcctggccagcatggtgaaaccccgtctctactaaaaatacaaaaattagctgggcatggtggcaggcacctgtgatcccagctactcgggaggctgaggcaggagaatcacttgaacccaggaggcagaggttgcagtgagccaagatcgcgccattgcactccaacctgggcaacagagcaaaaagattccatctcaaaagaaaagaaaagaaatctgttaatattattaaaatatttatgtcactttggagaatcttcccttagaagtaaaagctccaatacataaaagacagatgaacatgtgaacatggacatttattgtaaaaattgttcttaatggcaaaaaaacccccaaaaccaaagcaaacactagaatcaaagtaaatacccatcaactgggaaattgtagaaaggaaaaaactatagtgtatccattccatagaatgttaatatagccattaaggtggacaaattaaaactatgctagtggacttgagtggaattccacaatgttctcttgagtgaaaaatgcaaggtagatattaagtatgttaaatatgactccatttttttaaatcattaacaaaatgtctctaggtgtttgtcagcaataaacggtatctatatatgtttatttgattttatgtgcatgaagaaaagtatagaagagtatgcattgacttggagggaggtgggtaatgcaggtaggttatgggggagtcaggggtgtagggaaaaggaaaaccaaaaaagaaaaatacataaatgactgaatcacgggtgataccacaaatgtgtgagttagtaaatttggctggggatgggggagctagaattttgctaatttgtggggatgttcatggtatatattgtaaaaagggaaaatttcataataatgtatacgattctatttttaaaaaaagtaaaaactcctgtgtgtgtatatatgcatgtggatgtttatatgaacatagaaaagtgtagaagaatacacacgaaggtgttaacattcattggttaccttggtggagaagggtaataagttttctgaatacctttgcattgtcttgttcacatatattgcttttgtaatttgaaaaacaaaataaagggggaaaacatttcaaactgaatgaagccttgaaaatgtttccattttctgacaagatggcaccctgacttggtctagggttgaggttagggttatggaaatgacgtcttgtcacctttgctgcattctactagaaacaagtcataggtcccagccatactcaaagagaaggaattatacatgagagtaatttccttctccagactaccaggcagcagagatcattgggggccatcttggagtctacccacctcatcagcgaaacacttatttgaaactagggaggagtgaggatggcaactgtgttggaacagtagtttaagtaagccacatacttgctgctgggcaccatgagtgcacagattctagatgtgcttgctggaagttctccactaaacagaagtattcatttatccacaagtatatactgagtgcttactatgaactggacactgttctaggatctggggataaagcagtaaacagaaagaaatgttgataattgtcaagaagcaaaatgaaataggaggggagttaaattttagatgcagtaaccaggaaagccctcaaaatgatctctgcattaagacctaaagggaatgagagatgtaataatgcaactgtctagaaaattgtattctaggcagagggaacagcaaatgcaaaaatgcaaacaccctaagggaatgtgtctggagtgttggagaccagaaaggaaggtgtattcttgttgaataacaaattgtcccccaaacttagtgacctaaaacaacaataaacgtctcacatgctgtctatgggtcaggaattttgaaagtgccattggattcacactccccttagctgtgcttcttccctctcactctgcccttccgaagtctttgtccaagctatctctctttccagaccagcacacaggagggccagtgccatttgcgcttatgggaaggaaggagtcccctctgccatggcctttctgtgttcctccacccagcagtggaatcgaagctgttcagcaccttctccaaaatattggcgcccaatataccctaccattcaccaatgagagcaggttgcagaccactactgtctttctccgtctttcttttcctttttttttttttttttgagacggagtctcactctgtcgcccaggctggagtgcagtggcatgagcttggctcactgcaacctctacctcccgggtttcagcgattctcctgcctcggcctcccaacatgctgggattacaggcgtgagccaccacgcctggctaatttttgtatttttagtagagacggggtttcaccatgttggtcaggctggtcttgaactcctgacctcaagcaattcacccacctcggcctcccaaagtgctggaattagaggcgtgagcccccacgcccggcctactgtttttcttatgactagcactatattgatggagaggagatgcgggcagtggtttcctgcagaagtgacagcctcagagtggggttccaacagaaaggatggtagcaggtcattgtcaactgtgtatccctacctagaacaaccaaaaccttggggtcagaaaaagataggctgggggtattgtaggacacatctttgaaaatggtcgtccccagggagaaacagctaaatgggtgcagctacctggtttcaccgcatagacgcaattaattactcagcatctcacactataatggggcgccctgggcatttagctacacagcggaaagccacacctgagtgtgtgtggcagccttggggcgaggtggagagggttgttgcagtggccctgccgccacagaaggagagatgtcctttgaggaaaccatggcaatgtgtggtcttgcggagagatggggcttaggaattggatgcaattgactgaaaatgggaagtgggtggcaggaatggggtttaggaattgggggaggagaatcagttctgggatgtagtgataaagaggtccaaggaatgattgcatgcagatacttggttttcaatgattcaggagtccagagaaggctataattggtatgggtgtcccagtgggtcaggtatccgaggtcttggaatttgggagagtggtagtctctgggatatgggatgtggggagtctaaggagtcaataagggatctaaagggttggtgataggtgacttctttattgtggtaaaatacataaataatacaatttaccatttaaatcactttaaagtgtataattcagtgacattattacacttacggtgttgtgcaaccatcactacaatctagttccagaaatttttcatcaccccaaaaagaaaccctgtatccattaagcagtcacttcccattcttcccaccccttccttccccaaactcctggcatccactaatctgctgtctctagtctctaatgatttacctattctggatatttcatataaatagaattacacagtatatagcgtattaacaaactgtcctcaaagttccttcatgttgtaacatgcctcagtacttcattcctttttatgactgaataatattccattgcatgggtaataccatcagttggtggacatttgagttgcttccaatgagaggattatctgagtattgtgaaatgtactgctatgaacattcttgtacaagtttatgtttaaacaccttattcaattattttgggcatatacctagaagtgaaattgctggattatatggtaattctatgattaacttatgaagaaataaccaaactgtgttttttttttacagtggctgtacctttttatattacaaccagtaatgcacaagggttccagtttcttcacaacctcgccatccatcatttgttataatcatgtgccacataatgatgttttggtcaatgagggaccacatatacagtagtggtcccataagattatagcagagctgaaaattttctttttataaaattgtatttattattattattttttttccaacttttatggagctgaaaagtttatactgcctaatgacattttgatgatcctggcactgtgtgtacctaggctaatgtgtttgtgtcttagtttttaacaaaaaagtctggaggctgaggcaagagaattgcttgatctgccctattaattgcaattttcacagttaactagtactatttttatttaaataatattacctgggaagcggaggttgcagtgagttaagatcacgccactgcactccagcctgggcgagagagtgagactctgtctcaaaataaaataaaattaaattaaaataaaaaaattaaaaaaatttttaagtagaagattatagaataaggatataaagaaaatatttgtgtacagctatacaatgtgtttgaagctaatttattacaagagagtcaaaacatttttaaaaattaaaaggtttataaagaaattatagtaagctaaggttaatttattaccgacaaaaaaattcaaataaatttagtgtagcctaagcatacagtacatataaagtctacagtagtatacagtactgccctagccttcacattcactcaccgctcagtcactgactcacccggagtaacttccagtcttgcaagctccatccacggtaagtgctgtataccggtatacgatttcttatcttttataccatatttttactgtaccctttctatgtttagacatgtttagatacacaaataccattgagtataattgtttacagtatccaggcaatttggatttgtagcctcgaagtgataggctgtaccatcaggctacatcatctaggtttgtgtatgtacactctataatgttcacataatgatgaagtcacctaaccatgcattactcagaaagtatccacagaattacacaatgcatgaccatatttacattctgctttttaaaaatcttaaattaggctggatgtggtggctcacgcctgtgatcccaacactttgagacaccaaggcaggcagatcacttgagcccaggagtttgagaccagcctgggcaacatcgcaaaaccccatcccaacaaaaaaatacaagaaattagctgggtgtggtgatgcacacctgtggtcccagatactcaggagtctgaggcaggaggattatctgagcctggagaggtggagtctgcagtgaaccataattgcaccacagcactccagactgtgtgacagaatgagaccctgtctcgaaaaaaatcttaaatttatgtatcttaagaatatacattaatatagagtttaaatatcaaataaagagggttttttaaagttgaaacaatgtatcagaggataaaaaaccataaaacatttgtttaaatttaaaggatttgtttaatctgccctattaattgcaattttcacagttaactagtactattttttatttaaataatagtatgtatgtaacagaatagtaaagatgtaacctgtggatgctgttttacagcagcagaaactggaacacatgcagtctcatgattgtcctactcttttgccagatcattgcattgtctgcccaggcacccctcatcccatctctctccatcccttttcttaccttttcatgttccttgtcttttcatgacagcatttatcaatgtctgaaagtagaatgttgttgattgactctctcttcaactagaacataagcaatgagcggcccagcctttgtcccacacactgcagtgtgtcccacttctaagaaagtgtccaacacacagcaggaactcagtcagcatttcttgaatgaattaagtgaagtgatgcatacaggccacattctgagctgctggaggagccagtagttgattaccaaactctagtcctttatcttggtgtcctgatgtcctgactgatacacagtttgtaggcaaatagctggtggggtttagtagtatgggatagaataaagggagatgtaattgggacactctccacattatctgcccccatgaaaagctagttccaggtgttgccatctctgccccacactgggcttgccttagtcctcgttcccgccttttccagacagcagtgctgagaagcaggagcccctgagcttggagacgcaggaagagccctgggaggcccagatcaaagggaggcagtcagctcatggagccgaggaatgttctgctgacacccaccccgagggtatccggtatgtttctgtgcaccagcgacccctccacacctcaccagattggttccccagccccgtgggacccaattccgggtcaattccaatttgattccagtccagaatcaaatcagaagagcaatcccgagtgcccacctcacggtctgaagcacctcctcctacacccggacccaaacacgaggtcggctcaaggaggcactgaggtcacgacagtcagggtcctgcgctgcttgtcgcatgcagtctccttccccgaaccgccgcctgcacggcctccactgttttcctattgggctgcagcctgagagccctgacaatgcggcccacaaaccgggaacgcgaaagtgcacgtaccaggcgcgatcaccaggcgctagcgctgaggggggactcgcgtcacagtaaccgccaccgttgccgggggactggccccagcggcttggcccccaggcgtctgtggcagtgcgtcccctctccgcgggatcgtcgccatggtcctgcgatcctaggagtcgggcaaggccgaacctgcctgaagaaacctcaagcggagattcaaggaagcaccacgtgatccctaaggatcccaaagatgcgtcgggcatgcatgggcggtgtgagggtgcgtctccctgacaggtgtccccgctgggatttcgaggtacggcctgcctgtgttccccggggcgctctctttccggaggggtttcctggcagagagcagaaccgcgcagcctcaggagctgcctggctgtgtgtgtttctgtgcgactgttggatgtttccgtgtgtctttctgtgtgtgcgtgtgagtgtgtgtgtggtgtgcggtgaaagaaatgtggctcgtgcagtgaagcgcggtttctctgtagttcgcctacgctctgatgcgcccgtctctttggccgggcttgggttgcggggcaagcgttctttgtttcgctcttggttcctaaagcctcggtgaagtggggggctggctgcgacccgcaaacgtccaaatcacctcccctcccaagccgcccactcttccagaaagaagaccagcacacgacaaccaagaacaaattcctccaggggcccatggtcctgcggcacacccaaggctggacggaccctagctgtcctgtcctcagtacccccttgagcccacttctaattcggtggctggcggagtcgcagcttcaggacctgaggcgggcactccttcatcctcttcagatttcattctggattaaaggatgtgtgcagaaaaaaggtcagatgggggtgaagatacaatccgctgaggtgtggaggaggtctcgcaccttcacctgcagaacaggtgcagacagatgtcaaagaaactgtttccaacgccatccccttttcctcttcactgtacaacctgtccacaccatggcgctgtgctggcgatagaagacacgagtgttcggagaacctttggaccgaagactgtcgcctttctggccaggtcccctgttggaccctggttccccgaggcacatgggagtgggatggattgatcctgcctgggctgcggcctctactctgttctccctcttttcttgccttccctgattctcgtcggcccaggttttccttggtctggctcacagtcctccagaacgtccttcacagcaaatgtttcccagttcgtccaggaccaccttggcggggacgtaggtgatgagtgtttccttctcaacactcacatttcttaatgactgggtagctgtgatgctcttggaaccgtgggtgcccgtagctttccccaataaggaaactcttggtctccccattgcatcagatggctgcatgattcacatagaatgagaggtagccagccgtagctggcctttgccttctaatgaaggctatgtttcatctcatctgctggtgttttctcattgttgaggggtctcccattgctctgttcctggctgggactgcctctcagcactgcaccttttcgttgccagggatttcacggagcaaaagggactgggggttagctgggtgtagacccggtggtgggttgtgatcccggtgtgggtgctggatcactttgcaggatcctcttggctcctctggcaggaatccctggaggaggcttggactccggcacaggccctcctatggtttcaggtgtgctttgcttgtgcttcgctttcttgggggtatcctcagtggccctcgccagcatgcctggatatcccttttgggcttggattcaccccagaaggcctctgagacactctctccacattttctgcccccatgggatgccagttttaggtgttgccacctctgcttcacatcgggcttgactttgtccttgttcccgccttttctggacagcaatgctgagaagccgaaggccctggtcttggagaccaggacagggccctgggaggcccaggtcgaaagggggccagtcagctcatggggcgagggaatgtcctgctcacaccctccactggggtctcaggtatgttttcctaccccagcgacccctcaactcctcaccagattggatccccagccccatgggacctgattcctgcccacaccctccaatctagaatcaaatcagagagcagtcccgagtgcccacctcaaggtctgaagcgcctcctcctccacccagacccgtacacgaagtgggctgaaggaggcactgaggtcaggactgtcagggtcctgcgctgctggtctcacgcagccttcttccccgggccgcagccagcacggcctccaccgttttcctatgggccctgagagccctgacgttgcggcagcgccagccgggcacgcgaatgcgcatgcgccaggcgcgcgtcaccaggcgcgacggctgagccggggctcgcgtcacagtgacagccaccgttgcctggggacgggccctagcggcttggcggagctggagccctccctggcagtgcgtcggcgctgggctatggccccctcctctccgggggatcgtcgccttggtcccccgaccctaggagtcgggcagggcagaaccaggctaaagaaacgtccagcgtagcttcaaggatgcaccgcgtgatccctatcggatctccccgacgcgtcaggcctgcctagacggtgctgggagcgcgtctccttgaacgttgtcccgcctgggattgcgaggtaggtaccgcctgcctgtgtgtaccggggctgctgtctccggggaggggcttctggcggacaggagaaccaagcagcctcaggagctgcctgggtgtgtgtgtttctgtgcgagtgttgcatatctctgtgtgtgtttctgtgcaagtgttgcatgtctgtgtgtgtggggggggtggtgtctggtgaaaagaatgtgtctcgtgcggtggagcgccgtttctctgtagtccgcgggctctcttatgcgccctcttgtggtcccaagtgtgcttttcttgtttttcgctttcttgggggtcattgatttcagctctaagcttaattccttttctgagtctcacctgtttctttaagtgggaacttaaaccattgatatgtatttaaaagcatacatttccctcaaagtgctgctttagttgcattccacaaaattttatatgctgttatttttgactccaaataggtaattttttacttgtcccatagtttacttaaatgtgtgttgcttaatttgcaaacattttttaattttgacattaatttctggcttaattctactgtggttagaaaacagattttctgatttcaatccttttcaatatattgacaatttatggctcagaatataaacaagcttgctaaagttctttgtataagtgaaaacactgctgctgctcttaggtggactagtctataagtatcaattacaacaagttggctattagcaccgttcaggtatcttatatctttatagattttctatatacttttaaaagttaatgagagaacagtattaaaatctcaaaatatgattctgagttcatttatttttatttctagcagtttttaatgtattgtttagttctggtactaggcacaagtacttgtatgattgctttgtcttcttggtcaatacacttctatagtattataaaatatgcctttttagaataaatccctggtaatattctttgtttcaaagacaatttgttgtgagggccgggtgcagtgggtcatgcctgtaatcctagcactctggaaggctgaggtggtgggatcacttggagtcaggagtttgagaccagcttggccaacatggtgaaaccccatctctaccaaaaatacaaaattagccgagtgtggtggcgtgcgcctgtagtcccagctactcgggagggtgaggcaggacaatgacttgaactcgggaggtagaggttgcagtgagccaagatggcaccactgcactccagcctgggtgacggggtgagactctgtctcgaacaaaaaaagacaatttgttttatgttcacatagccattttggtatagtgtttgcatggtgttttttttttttttttaacttttaacctatttgagttggtatatacttttgactttttaatccgagtcttcatattttaatctttttttatataacctaacatcttttttttttttttttttttttttttttttttttttttggagacagtctcgcctttgtcacctaggctggagtggagtggcatgatctcggctcactgcaacctccacctcctgggttcaagcgattctcctgcctcagcctcctgagtagctgggttacaggtgcccaccaccacgcctgcctaatttttgtatttttagtagagatggggtttcaccatgttggccaggctggtctcaaactcctgacttcaggtgatccgcccaccttggcctcccaaagtgctggcattacaggcatcagccaccacgcctggctttcttctgtgtttttttactgaagtatttaggccattaacattgtttgtaattattgatatatttgggtttgtaacaatcatcttgctctttattctgtttctcttatctatccttaattctttttctaattttctgcctatttttgtattttttaaattatattctattttacttctactactggctaaatattacggcactttttagaattttgagtgctttttttcctagaggctttcaacattcatttttagctttcaatgtctagttttacatattataccctatcgtatatttgctgggatctcacacaaataatacttccattccaccttctcacctttgagccattttcatattttaattgccacaaatattaccatccctatactacattattgattttgcattaaaaactcaattactttttcaagagaatatgaggaaaacaatatttactcatatttaacttttctgttaatttccattcgtatgtatgaatccatgtttccatctgcatttgttggtgatgaattctcttaccattcatttcttttttcatttgaaactattattttagggtcagggagtacacatgcaggtttgttacattggcaaactgcatatccctggggtttggtgtacaaatgattttgccacccacatagtgagcatagtagctgacagttttttgaccttcacattccttccaccctccactctcaagcaggccctggtgtttattgttcccatctttgtgtccatgtgtactcaatgtttagcttctacttataagtgagaacataacagtatttgggtttctgatcctgcatgccttcacttaacggcctccagctgtgcccatgttgctgcaaagaacacaatttcttttttccctgaggctttagctttcatttgtttataaaagttttcacttttttcatattattaccaagtgcagaaataccagatagagtttcctccctattcctttctctgctagcttgcatagattctcacaaggagtttatgaatcttgttacttttgtccccatgtatgtatcttttttccatcaggctgttctcaagattttcctttaccactagttttcagcaatttgtcttgtgtttagctttgagttccttgagcttcttagatctgtggctgataggttccaaaaaatttggagtattttcaaccattatttttaaatattttttctgccttctccccgcttctcagactcacatttacatatatctttatattttcccacagatcaccaagactcttttacagtgtttttcccttgttgtacctgagttagagaaaacgccacactttgagacgaattaagagtccatttattagctggcgaccgagagacggctaacgctcaaaattctctcggcccgaagaaggggctagattttcttttatactttggtttagaaaggggaggggagggtctagttaaaacaattttacagaaataaagtaggcaaaaagttaaaaggataaatggttacaggaaattaaacagttccaggtgcaggggctttaagactattacaaggtgatagaccgggggctttgggcgttatcaatcagatgaattcctgggaattgcagatatagcttgccacagtatcttatcagttaattgcattcttggatgtgctgggagtcagcttgcacaagttaagtccttgaggaagcggctgccagtgaaagagccaagatggagtctgtctggctctcttagctaagggagagtcaattcaggtggaaacaaggctgggtaattaaaggaaaagggagagtctaaaaacagggttagtaaaaacaaggttgggcattacattccccacttgtgtttttggggaatcaaatcgttgattcctcaattataacaagggggttatattgagtattaagatacataagtttgacagaagctatgcattcttttacaaaattaagaaaccaattttatatacaaggcccaaaaattaaacttaatagtatgatgaggagaggtccagctaacccagtgattaaagtagttagccaggggttccagttgaacatgctttgataccaggggatgttgttttctcgttcctgttggcgcctatctagattttctcgaacttttggagtgtatcttttatgactaagaatggtggaggaacagttaaatcaactttgttagggggtttctggaacatagggtcacctagatcagttaaaggcccgattggcttgggtgggctccatgagaccaggattttttggatggtgaacatagtcccaacatcaaatcctgggatataaaatcttaattcccatgacatgccataatactactgagttgaattagggtcatggacagttatagtaagaggattacaattttttctagtacataatttaggacgagaagcacgagttatggaatgaagatctggttgatcccccagagtaggtggctaaagttacacatgtccaatcagggcagaaaaactggtaagtatctcgacagctagtgtcagggtgattcccaggacagaggtaaaagtcaacattttggagtcctttttctgcacctttggagcttccacatccagtttggctcctggagtgtccaaatcctgctgcaaggttgacacttcctgcttttgggaccggcagattgtgttgctcttcgcgggtacgggctggctctgggaacagtacacataaatcaactgcaaaggagacttccttggaggtactggccctccaagtggtgtttgcaaatacacatcctgttgtgaaagaggtgaggagaaaggagtaggaaggcgcaaaggacataacaggcaaaaacaaacaagtgaggtagataaaaagaattaatctaatggcttcacctgacttaggtgcagttttaaaggggcctgacccaggcctggggacccatgtttctagttgggctctgttggcctttttgatgcgggagtgatgaatctaagcaggaatgccgtccaccttcagagccattggcgttgtgaggatgatggtgtgaggtcttttctaagcaggagtgagtgcttctttctggaactttttaacaaacactaggtctcctggctggaacgaatggcaggaccctgtctggtcaggaattggattcggatgggttccttgaacaagtggcaggatgatatcttgtacctgttggggagactgtaggtactgtaataaattcttttgtgatatttctgccaattgggcatctcttagcttaggcaagataggcggcgccctcccatacatgatttcaaaaggtgagaacctagcctagtaaggggtgcaccttactctaagtagggctaaaggaaggagacttacccaatttacacaagtttctaagattaattttgtaagagtgttttttagggtgtggttcatgcgttctacctgcccagagctctgggctcgataggcacaatggagcttctattgaatgtttaacgccttactgaccgacagaactatagacgaggtgaaggccggtccattatcagaccctatggcagcaggcagcccatatcgagggatgatttcattgagtaaaaacttaactaccaagttggcggtttcgtttttggtagcaaatgcctcagtccatccagagaaggtgtctactagtactagaaggtatttgtacccagcctggtgtggttttacttttgtaaagtcaatttcccacttctctcctggcaagtttcttcggagacggtggcctgggctgggtttaggaccttgtttggcatttacctggtcgcaggttgttccccagagagctgcttgatctgttaggctttgaagacgggggattcttgtttttgatagccttttctgctgaggtgagtagcctgcgctcctggcagatggctccatgtacatgcaccgtagcaaaggcgtacctgctgtcagtgttaacgttaatatccttaccccatcggagagcctgagtgagggcgatcaattcagctttttgcgctgaggtgtttgctggtaaagcctgagcccacaacacatctgtctccgtggtaacagctgcaccggcctttcgtactccctgctcgagaaagctgctaccgtctgtgaacacggtggcgtccgccttctctaggggcacatcttgaagatcggatgggccagtttcggtagtttccaacagttcctgacagtcatggatagtagctggatttaaacaccgtgtggaagagaaagtcagtttactgatctaacagtaaactctgatattgcaagatgcgagcatttgacatccattcgccagaagcactttgaagtaaagtctctatggcatgaggagccttaagggttaaattttggcccagagttaacttatcagcctcttggactaggcttgctgtagcggctactgcttggctcgcagacaacttggccatccagaggtctcaggatccagtttcttagataaataggctactgggcgtctccagggtcctaaggtctgagtaagcacccctttagcaactccctggctttcatggacaaacaggtgaaacggctttgagatattagggagggctaaagcaggggcttcagttaatgcctttttcaggtttcaaaaagcctgttcttgtgtgtctgtccaaattaacgggccatttcattctgtacctcttggatagccgccactaagatttttgtttgtcatttgaatgctttatcagcagccttttcagctgcctgtgttgctcgtttttgtttttcaaactcttggttgtcaaaaaccttttgggctatttctaaaagctgactgatattcattccagcaaatccctccagtttttggagttttcttttaatatctggggctgcctgagccacaaatgccaaattaagagcatggctattttcgggggccgctgggtcaaaaggggtgtaaatctgataagcctcctggaggtgctctaaaaacggtcctggtgactcatcatgcccctggatgacttcattcgccttagacaagtttatgggtttccgagcagctcccttaatacctgcgaggagataccggtggaaatcatccaaagctctccctccacttgaggaatttgggtcccaattaggccgggtagagagaaagacctctgtgcacatttctgaaaatcttttctgtatatctccttcctctctggaactctgtcctgcaccagccagcatgtctctgttatcttcttaacacagtaagaacttcatgttgtttgggatcagctttctcattatccagaatgtgtctccaagtagaaagtttgtgtgactattgcacaacttcactatatatatatatatggagagagagacagagagagagagagagacagagagagagtgtttcactctgtcacccaggctgtaatgcagtggcatgatcacagctcactgcaatcttgacctccctaaattcaggtgatcctcccacctgtctcccaagtagttgagaatacaggcatgcaccaccacacctggctaacttttgtattgtttatagaaatgggttttcactaacttgccaaggctggtctcaaactcctgcgctccagtgattgccttggcctcccaatatgcgaggaatacaggcatgagccaccacacctggcccacatgattctcttctgtcagggatcacagtcatacaaaccaattattccatcatggctccaacagaagctcatgttttttgacactggtgatgtcactggaaagaaacactctcacacattattggtgagaatgtaaattgacattttcaaaagtaattgggcatgatctattaaaatttaaaatgcacaaatacttttgacttggcagtataatcagttgtaatatattctatataaataaaatccaagaataaacatataaagatatttattgcactagtttgcagaaatagaaaactcaacctgaatactcagcttatggggaatggatagagtatatcatggcattgctgttactaggttgctacatgtaattctgcaggcattttgaaaaagaaaagcaaggtgcacaagacaaataccaacaaaatataatgtacagaccttatttaaatctggactcaaaccaactattattgtgaaaggttgacttatctgttcaagatacatactgaaaatatttagggggaaaaggtatatagcatgctggttgtctttaatatatcccagtgaaaacttattgggagagaaaacaagaaaggcaaaaatagggtgattattaaagaggttatgggtacactgtactattttatttttgcccatgtttaaaattttctaaagttaaaacaaattaaagtgacagatatatttgcagttatcctattatagtatactgtcaccagactgaaatgacacccacacttgagcacagaagaaaacatcaaaaaataaacacgaaagttttaacagcagatgagtgcaatacaatgaaggtggtttttaaaaatttttttagctgggcgtggtggctcacacctgtaatcccagcactttgggaggccaaggcgagtggatcacttgaggccaggagtttgagaccagcctggccaacatggcaaaacctcatctctaccaaaaaatataaaaattagctgggcatggtggcaggcgcctgtaataccagctactcaggaggctgaggcaggagaattgcttaaacccgggaggcagagattgcagtgagctgagattgcgccactgcactccagcctgggtgacagaatgaggctctgtctcaaaacgaaaaaaataaaaatataaataaaaataaattttacactatttccttggtataggataaacttcgtatgtaactttgtaagataaatgtaatgattttttttttttttaggatagagacttgctctgttgcccaggctggagtgcagtgacacgacttggctcactgcaacctctgcctcctgggttcaagcaattctcctgcctcagcctcccgagtagctgagattacaggcatgtgccaccacacctggctaattttgtatttttagtggagacggggttccaccatatcggccaggctggtcttgaattcctgacctcatgatccaccagcctcagcctcccaaagtgctgggattacaggcgtgaatgtaatgatttttaaaaagaaaaacatggatgtaaagaaagtaaagcttcgttttgaacagttatgatggtaacaaaactcaaaggagcaactaaagcagtgctgcaaccacttttgtctgtcttagtaattctgattagtgtacattcctcccccaccaaccattttgagagaaatttgtctgaaaacatgatttatgaaataaacataagtgctgaaagagttaacagttattaagtttcttcttttaaacaatcttgtaacaacagaaaaagccttggtcaggtatggctcatgtctgtaatcgcagtactttaggaggccaaggcaggaggatcacttgaagcccgggatttgagaccagcctgggcaacaaaataagaccctgtctctacaaaaaaaaaaaaaaaaaaaaaaaaaagaaagaaaaaatttaaattatccaggtgtggtggtgcacacctatagtcccagctacttggaaggttgaagcaggaggatcacttgagcccaggagtttgatgctgcaatgagccatgccactgcactccagcctgggtgacagagagcccacctctaaacaaaaaaagacaaaacccttataaaattgatctagacaatgatggagtgtagaggattgtaaaaaccttggctacagaaattgttcctctctagtgtagtccatgactgaagaacagaaaagcactatatcatccatcaaatttaaataactgacataatgcttaaaatttccccttaccatcattctttatggttaaaaagaaattctgcaagtgtgttcacaagccaaagatattaataagcatacagaagagaaaggattaatggtcaggactgggaaacaatgggttaaacaaaagatagtattttctttactgcaggtcttctcaaccttttaatttggtttgttcagagtggaattcacaatgccagtaaggaaatttggttatgcactgtatcatatgcaatgaggtagaacccgctctacgtattttgggaattatttcttgaacatatttttgaaaagtctggctcaagatattgtctgcaaatggcagttaatatgcaagtatgtttgatggtagaagggcacctaacagtctactgacatttaacttttcctttaaatttataattttgcaattatgttaatctctcaattgttaatgactgaataatgaaggcataacttatccaatctgaacaaaatgtactttagagacgaagaatgcatgagtgttgtggcatcatggtggttacactgattattcagagttctaatgattctcagttaccacttttttttggacaatagtttgtaaaacagtgaattaacatttagattataatcatacactatatacaatcagtggtttccagagtgatgacaattcagtgggctgcaatgttcattaaagataatgtaggccgggtgcggtggctcatgcctataatcccagcacttcaggaggctgaggcagacagatcacctgaggtcaggagtttgagagcagcctgaccaacatggagaaaccctgcctctactaaaaacacaaaattagccaggcatggtggcacgcacctgtaatcccagctacgtgggaggctgaggctggggaattacttgaacccaggggtggaggttgcaatgagccaagatcacaccactgcactccagcctgagcaacaagagcgaaactccgttttttttttgtttgaaaccaaaaaagataatgtattagaagacaagagataacactgcatatagaaaaggtaagtatttcttggtaacatttgtttttctatgaacagctttgtatacagtaactcaattttgaggtcttgagttctgtgcaccagatgcttggaatcatagaagaactgtaggcattgattgattgctgctccaatatattattctaactcaccttcactcactgaacaccattaacctcttctcaccatcattaatttctgaccatcagccctcattcaacaacattctaattaacaagttcaaattatttaaagctgtttttatctgtcatttgcgtccattatgtactaatgtattacatttattgtcactatagtatctgttccttaaagcatagaaggaaagcataattcatgtattatatttttcaaaatcactgcatgcacaaacatatctggtaattaactgttaactggcttttgagtgttttacattattcagaaatccctgatagaggtcatttaggtggcttaaattaagttgaattcaaattaaatttggttaggattttttaatggactgaaaacatactgtttttcctatttaaaataatggggccaaataaaaataatacaaaccaaaaataaaataatggggccagatgtggtggctcacatttgtaatcccagcacttctggaggctgaggcaggtagatgcttgagcctagaagtttaagaccagatgaggaaacatagtgagaccccatctctaaaaaaatttttttttaaatgagctaggcatggtgatgaacagctatggtgacagctacttggcaggctgaggttggaggatagcttgagcctaggaggtcaaggctgcagtgagctgtgattgtgccactgtactccagcctgaacaaggagagcaagaccctgtctcaaaaaaaaagaaaaaaaagacaaaaagaccaaaaaatggaatgtagcctccgagatctgggtctctaaaaatttaccattcagtatatcagaaatgggttagattcaaatgaggaaaaactgtagttggtaaattttgtttatatttccatttaaggcaaatatatattttatacacacacacatatacatatggaatatatatatggaatacatatgtggaatatatacatatatggtatatggaatatatacatatatggaatacatatatgcatacatacatggaatgtatacatatgtggaatatatacacacgtggaatgtatacatatggggactatatacacacgtggaatgtatacatatgtggaatatatacatgtggaatacatacacgtggaatatatacacatgtggaatatattccacatacacacatgtggaatatatgtatatattccacatacacacatgtggaatatatgtatatattccacatacacacatgtggaatatatgtatatatatggaactaccttggccatcattttgttaagaaattctttttcccttaaagtaacaatcagaaaatgtgggccaaaaacttttgcttttggaatttgttgtagaaaaataatctttcactttcttaaaaaacaaaacaacaaaaaacaacagccctaaagcaatttttggaagtttcttcctggtgtggattatctgatgctcagaagtccttcatacctttactatactttaaaggttttgtctaaaataaagtatctgttgttctaaaggggctacatgataagagaatggttgcatctttttactgtaatcataaaatattcccaccatttgagttctctaacagtatgtaatgatgataatggcaatcattttaacaacaaatatcagatgctatcgaaagggaattatatgtatttaattataatttagtcattgtaatacaattacagtattttacaaatagaaaagaacacacaagaaatatataggatttcagttaggatatggtgaaatggagatgatgcttaataaaggatataattcagcattatattctagcgtttatagagatgttaaggaattatttaaggggtttctgaaattattctgcatccatgttaatgtaggccttctaagaatgagcagattctgagcagaagcaagatgttctacattcattatagatatgaaatagatgaagattttcttaaatttaatcacattcaaggctttctcaattatgaagccttgtatgttgagtaagttgtgaaggacatctaaagtctttaccacactggacacatgtatagggtttctcaccagtatggatcctttgatgcagagtaagttctgagccacgactaaaggccctcccacattccttacattcatagggtttctctccagtatgagttctcagatgttcagtaaggtgtgagccacgaataaaagccttcccacactgtttacattcataaggtttttcacctctgtgaattctctgatgttcactaagttgtgagccataaataaaggccttgtcacattccttacatttgtagggcttttcacctgtatgaattctttgatgatatgtaagttgtgtagcacgtacaaaggtcttcccacattccttacattcataatgtttctcaccatgaattttctcatgttgagtaagatatgcaacacgaataaaggcctttccacattccttacattcaaagggtttctcacctgtatgaattctctgatgttcactaagttgtttgccacaaataaaggcctttccacattccttacatttgtagggcttctctccggtatgaattctttgatgttgaataagattagaattagaaataaaggctttcccacattctttgcatttataaggtctctcacctgaatgaactctcaggtggtaagtaagttgtgagccacgaaaaaaggtcttcccgcattctttacattcatagggtttctctcctgtatgaattctctgatgttcattcagttgggaggcacataaaaaggctttcccacattctttacatatgtaaggcttttcaccagtatgaactctctgatggtatgtaaggtgtgaaccaagaataaaggcctttccacattccttacactcataaggtttctcaccactatgaattctctgatggtaagtaagttgagagccaagaataaaggccttcccacaatccttacattcatagggtttttcaccactatgaattctctgatgaagagtatattgtgaacaataactaaaggcttttccacatttcttacattcatatggtttctctcctgtatgaactctctgatgttcagtgagctgtgaaccacgaataaaagctttcccacatgcgttacactgataaggtttttcattagtatgaattttctgatgttgaatgagatcagaagtacgaccaaaggcctttccacattccatacactcataaggtttctcaccagtctgaattctctgatgttgaatatagcttggctttttgctaaaggtattcctgtgtttcttaacttcagagcatttttctatattatgattttcctcatgttgaataaggcatgacaggtagctgaaaccttgtctgcattccttacatttgtacaatttttccttggtaggaattatccgatgaaaagtagaagaggttgaatgactttcagtggccttttcttcacaggtaattttgacacacatgtaaagcccttcctgacttgcttcttgaccctctaagttgcctttgcactccatattgtctccaagaccattgtattgaaggtgatggttgatacgtttccccatattctcccactggagtgattccatttcataaatttccttttctggagataactttttggtcacacaactggattccaagtctgtagaataaaaagaaagcaaattcctgcttttgtttacaaggagaaataaaaattctatggtaaaaatgatagatgaaaataattctcattaagaatagaatggcttaaacagtacagaaatattttctgccatttttctttaaaggcacaaggagagaataaagaaaaaggagagcttataggaaagaaggtaattagaaaaataggttaagtcagtggttctcaaactttggaatggcttagagacacccaggaggcttataaaatagtaataaaaacaccctcttgaaaacaaacagatgtgtagctggacatacaatctatcaacaaatcctatcagctctcctgtcaacattaagaatctgaccacctctactaccaccatcctaggccaagtcacccctctctcattgtcataacctcttagctggtttctctgctttcatccttgcttctatgatctattcttcatacagcagccagaggaattcttttaaaatgtggtttatataacatgatttcccctgctaaaaatcttccctattaatggtctgccatctcaggataaaatccaaagtccttaatatggctcacaagaccctacacaagcttgcctgtggccacttttcttatgtcatctcccactttggccacttttctgatatcatcacttaccactcccctaattattcatttggctgtggtcataatggcctccttggtgttaaaaaagtgtcaagcatatgcctacagttttgtctttagaatgcccttcctctagatacctgcatggcttgttccctcatttcagttttctgctcagctgtcacattatcaaaacatccaacacataattgtacctatattgcatttttcactaatggatataccatttctaaagtttgactattgtctgtctgtcccatgcttaatcaaagcaagggctttgtttcatatactgctttatctctagtgcctaacatcattacttacacattgctggcattcaatatttgtcaacaatttctaaaatatatatgttccttcattcataaatctccttagatgcttctcataaaacacaaagtttgagaatagagctaataatctttcaatggtttacccttgtatttagaataaaatccaaactcctattcatggcctacaagcccctttacgatccagttctttcttaaatttctccaatttcttcaacgtaccttttaagcctcaaattgagccactactatcttcagaacaatgctctaatcttattggcctgatttaagttccaagaacatgtcaaattctttcccattttagattttccatatgctgttccatctgccaagaatgctctcaaagtggccacctcctttgcgtgtgaaatgtcctagcttaaatgtcagctgctcagaaagactatcctggatcactttaattaggtccatgccaggtattttctatacctgtaatttattcctaattcttgtttgaatttttgcaattctaaaatttcatttatttatctgttgatctttctgctcctcaagctctacatgtgtagggggaaaatgcctgttttattatatagctagtccccagaacacagtatacatataatgttttattcctttaatatagtttttcatgtcttactttccaatatttattacttaaggccaaatgttcttatatttcccaaagaagtacctcaaaatctcctagaaatagtgacaagtttacacaataaagatcttatattattccgaagaaagaagttgagaaacaagtgtacttttcaaatgcagagaaacctatctgatgtaactggatcagcaggcacagggtctctgaccactgtatataggctgtagaataacaaagactggtcatgggaagaaaaataaatacacatcagtaagctcaaatttaaacagtcttttagaaataagcctccaaaacttgagaaaacacacttttgctgaaaagcaaaaagaaatgataaaaacaaaagcaactacccccccccacttgccatatacacaccacagctcagtttaacaccaattcatgtcagcaacacatcctagaacaagatagaccctgcttttgtttctttcatagaagaacaatatggtttataaaacactgaaagaaatcaatgggcttatggtgattaagggaacactataaggaatcaaataaattcagttgggacccaaaatagctacctatgtgctagtgccctaataaaaatgggaagaaatattaatctaatatgattctggggtaggaggcactatgagaacacaggatggtgctaaacagaaatctagaggaatatagaaaaagttaagattagaataccaaagtctcagaactgtgcccagaatgaggagtacatataaaaatgtattcaattaagtagcagctctttttattgtcattaaattaatgaaaaaactatatggtgaaaaaagggaaaactgcaaaaggggtgatgagtgaagacaacaaaatggagtctgaaaaggaggagtcattttaggaggtttcttttattcttgcccccatcaagtcctactgaatatatctcctaagtagctctcgaatctgttaccttatcaccaacaccactgctgacactcgggaagcccaaggcatcttttttttttttgagatggagtctcgctctgtcatccaggctggagtgcagtcgtgccatctcagctcactgcaacctccgcctccaggttcaagcaattctgcctcagcctcctgagtagctgggcttacaggtgtgcaccaccatgcctggctcatttttgtatttttagtagagataggccttcaccatattggtcaggctggtctcaaattcctggcctcaagtgatccacctgccccggactcccacagcactaggattacaggcatgagtcactgcgcctggccccaaagcatccggaaccacaacaaaaacctactcagtaatgttatgagaccctttgttctaatctccatctggcagatagaatggaatagtaaatatgaaaatcacattatgtcaccatcttaagatttttcaatagcctgcaaaaattggagggataaaatctaaactcttctgcagtatttttcaaacttcttttgactaaaatttcatagtaagaaatacatattatgactgagtacacacactcaaacataaaacaaggatgtcataaaattatctttgctatatgtattatatattcatattttgttattttatctcctgttttattaaaaacaacaagtgctgcttataacctactaggttgtattcataacctctagcaggttctgcccggcctggctccagtcaacctctccgactcccttgtggcacctctgcctcactaggctccagctgcaaaagccttctctcaatacctcatacaaaccaagctccatcctcctatggcctgcagtacactgttacttctgctaggaatgctcttccctcttctctctatcctcagtctccttacctgtttttcattctttcagggctcacctgaaacttcatgtaccattgcacttcctgagaagctgtccccaatcccaggctcctagcaatgctgttccagtaatctctcttctgtaagacagccactccacccactgcagtctacaaggaaagcctccatagctgtggtaagacctccacattctgctattaaggctggcttctccacagagatctcaatttccataagctcttagtgtaatagccttactatccttaagttataaaaagaataaccacccaccctcccctaaaagaccactagaggccaatcctttaatgcctgacatctctgggttatctcaattaccttaaaagctttggtttcctgggtccttggtcatcactaggactcttatcccatccatgtcctacttcactccaaactatgccttttggaattcacagtgtactttctacaaatcgtctacaacctctgccccgcctgtgattattttcttcaccttcttgatccttttgaaactttgagcacactacttggccagaaacaatgttttccttcatgtctttccctccacctcgcttcacctaacctctcccaagatagacataattatagcaagtcaacaccaactcaaggaatcagatatacaaaaaaatatactcaatgttaatttttctacaaatattcctaatcatgacatttaccatcatagaactaattgtattctgtagtctctttggagcaactctaattcaaactgtaattgttactacccaatgagaaaaccaaacagaatgattaaacacaggactttcatttcctgttgtatacactgattggctctttacccctactcatagaattaatctatatctaaaacaccatggattcattaaatatcttaataacctactactgaattcaaatactaccaaacttctgaatagtctcctataaatagaaggcattatagcattcatagtaaaaacaaaggaaaaacaacgaaaaaacccacccctttatatcctccatctttgattaccaaaagcatatgtagaagccccaaatgctgcacccacagttcttgcagccacattactaaaattaataggctgtggtgtaatacaaattactctaattttaaatctactaacagtatatagcctatttctaatatcactatgaggaataattataacaaattctatttgttcatactaaacagacttagaatcactcattgtgtattcatctgtagctcatacagcattactaattatagcatttctcatccaaatgccatgaagttttataggagccctaataactgcccatgaccacacaacatcaaaatgattttgccttacaaattcaaactacgattccaggcacggtggctcatgcctgtaatcccagcatgggaggctgaggtgggcagatcacctcaggtcgggagtttgagaccagcctggccaacatggtgaaactcccagctctactaaaaatacaaaaattagacagggatggtggcaggcacctgtaatcccagctacttgggaggctgaggcaaaagaatcgcctgaacccaggaagtggaggttgcagtgagccgagatcacaccactgcactccagcctgggtgagagagcgagactccatctcaaaaaaacaaaaacaaacaaaaaaacaaattcaaactatgaacaaatccatagccaaaccatacacaaggttccccaacttatgatacttagacttaagatttttcaaatttaccatggtaagaaagcaatacacattcagtatgctccttgacttaccaaggggttacacagaactacttacaatatttttgacattatccagaagtaaccccaacatatgttgaggagcatctgtactactagctcgcagactacagacattacttcctttaacagaaacatgataagtatgggctagcctaactgacctagccttttgcaacaactttttggctcctaaggccaacagattgcatctaacctttaaaagttcagaaagctatattgttacatatgaaggcatgagttagcagttgatagccttactatcaactattaaccagaatggagaattattttaaattatatctttttttatgatctaattttaccattatccaaatagactatatggccataattagtacattagtcctatctatcaatcacatcacaatgagaaaaattcacatatcacattaataacatcaaaccatcattcacatgagaaaatactctcatatttatacatctcctacttctgttacccctatcacttaactccaaaattattctaggacccatacactgtaaacatagtttaaataaaacattcagttgtcaatctatatagaagcttaaaactctttactgtagttcccccttaccaaggttttactttgtgtggtttcagttactcatagttaactgaggtccaaaatattaaatggaaaataccagaaataaacaattcataagttttaaactgtgtgccattctgaatagtatgatgaaatctcacaccatcctactccatcttgctcaagacatgaatcatccctctgaccagcatattgtctaattttgccattatccaaataggatctgcctattagtcaccacccagtagctatctcctttatcagattcaaaaaacacataatatatatggctcagtactagctctggtttcaggcatccactgggggagccttggaatgtatacgccgcagataagggggaactgctgtttttgctaagaaagtatgcaagaactgctaactcatgcctccatatataacaatgtggctttctgaacttttaaaggttagaagtaatctgttggccttaggagccaaaaattggtgcaacttcaaataaaattaattaatttcttctgttcttctatcataattttacttaccaacttatttttaccaattactataactatttacaaaaatactcatttgccaccagcctatttccaaccctaatatttattcattcagggcaagaaataattatttcaaactgacattgaatgactttcaaactttaaaactgacactcagctttaagttagactacgtctcaataatatttgtactagtagcttctttcatcacatgattgattatagaatcttcaatgtgatacatactttcagatctaaatattaatcagttacttaagtacatacttatattcctcaccaccacactaatcttagctaatgccaccaacctcttccaactcttttttttttcttccaactctttattggatgaaaaacaacagaaattatatcatttttacttaatggatgataacacagcctaacaaacacaaacatagcagcctccaggcaattctatataaaagtattggagatactggattcctattattaacggcatgattgttatactcaagcatttgagaattccaaaaaatttccacactcaaccccaaccctgacactgtctaattaggcttctcctggcagcagcaactggtgaatctgcccaatttggttttcacccataactgccatcagtgacagagggctcaacactagttttagccttacttcatttcagcacaatagctgtaacaagaattttcttattaatacacttttatctactaattgaaaataaaacacagtggggtgcagtggttcacaactgtaatgctaggactttgggaggctgagtcaggaggatcgcttggacccagaagtgcaagaccagcctgggcaacacagtagacacagaccttgtgtctacaaaaaaaaaaaaaaaaatccgccatgcatggtggtgcacaactgtagtcccagctactcaggatgctaaggtgggaggatcacttcagcccgagtgtgaggctgcagtgagccgtgactgtgccactgcactccagtctgcgcaacagaacgagatcctgtttcaaaaaaaaaaaaagaaagaaaaagaaaaaagaaaataacaaaactgcttagctgctattactactttattcacagcaatctgtgccctaacacaaaataacattttaaaaaatcattgccttttccacctcaaacctaggtctcctaattgtcactagtggcattaatcaaccacatttagcatttcttcacatctgtacacatgtattcctgaaacatatactttttctatgctctggatccattattcgtaccctgaatgatgaaaaatattctagaaaactaggaggcctatttaaaactatactctttatgtctttactcatttttagaagtctacacttaatagatatgcctttccttaaaggcttctactccaaagatttaattattaaaaccgcaacgtatgctaacacctgagccctttaaatcatgcttattgtcacctccctaagagctgtctatagtactcaaattattttctttccagtcctgggacaaccctgcttttcaactttaactcaaatcaacaaaaacagccccctccgagctaattcaattgaatgtcttgcaatcagtattattttcactaaatttttttatctccaaaaatattattcccataactattccccaaatgactatgccactctacctaaaactcttagctcatgctttaactaccttaagtttcattataacattagaactcaactaataacataaaatcttaaatttgaatcctcatacatacacaaattttccaaccttctaggtttcttcccaacagttgttcatggtttatcaccatacctaaacttttcaacaaacctaaacatagcaccagttttagtagatatgactagaaaaagtcactctaaaaatcatttctaacttccaaatgatagtttcaataaccatctcctaatgaaagtattttcttctccttccttatctcacttttactggctatactcctagctatctaatttcccagagtaatctcagtaacaataaagataccaacaaataaagatcaactggccacagccatgagtcggccttcataactatataatgctgttatacctacagaaacttcctgaagacgttcaaactcttcaccctcaaaaattacccaatcctttacattttcaaaatcaaaaatcacctccacttcataacctgttattcacataattataaataactctatgaacaaacctaacaatacaacaccccaaataacaaaactagaacctcaagtctcagagttctgaagctgatgttccacttaaactataacctgactctgctacttgagaaaaattattgttaaatgctatgtcagtactgagaaaataaaatctaactactttatggatgcattatgtgcttttcctgataataatgtactagtactattatgcttgattgtacattgtatatacatgtgtaatcatacattaagatccactccccatgcatataagcatatacatgaaattacaaacagtgcttaacccattgaatggcatacccacatatgtcagatttaccatacaaatactgttcaatacattaaatccttatattttacataggacatgaaattattgattattcacagtacattcagtcaaatcaatccttgacaacaagcttattaccgccaacaggatttctttagtactaagcttcaagaaaccagcaacttgcttgagatgtgtcccacttctcgttctgggcccatgaaacttggatgaaactatgcctgccatctggttcttacttcagggtcacggacttaagattgcccattcattcctctttaataagacatcttggtggactaatggctaaccagtccatgatcacacatcactgtgatggtgtcacacacttggtattttttaatttagggaatgttgtgatccaacatggctgtcacggacttgatgcaataaagcaaactgtagctgagctgaaattgaatagtctttctctacactgaaaccataaagtgttaattactccatgttcggtggacatagtaaaaaacatgacacaaacatatacacacaatttccgttaattaactccacaatctcaagctattgtagtatttgtggatataaggcttttattcttgccaaacttcaaaacaggaaatcttgtatttattaactacaggtaaggcatacatgcatacacacacacacacacacacacaagttcatctagaactaagttttagcccaactcctaaagaatttatcaaaatccaaaaaataaattaaaaattaggctttctgggttaaaagtttgttttttactaaatttactaaaaaatccaccaataatgacacagcatttaaacttagccattttttcttgagagagaattttccacatataagctaatgtagcttaattcacaaagcaaggcactgacaatgcctaaatgagttcatataactctataaacaaataggtttggtcctggcctctttattcatttttagtaacacttgcaactatctgcattctagtgagaatgtcctctagatcaacaaaaataaaatagagcaggcttcaagcacactaattagcagctcgtaaaaccttactctaccatacagccacagaaaacagcaatgataaaaattaagcaattaacacaagattgactaagttatactaattttccttagggtttgtaaaatttcatgcttgcagtcatatgactaacccaaattaacaaaacagcataaaacatgtttttaacaaaactcagcataaaacatgtttaagattataaacaaagttataccttaactaggtcataaaaagctacagctaatataaaaataaactatgaaagtgatttaatatattctgaatacatgatagcaaagacccaaactgggaagaaataccccaatatgcttagccataaacttaattaaattaacaaagttattcactttgttaattcaccagagtaactttgttaattcaccagagtactaccagcaacagcttaaaacacaaaggacttggcagtgcttatatccctttttttttgtaatcaataaaccccagtaaacctcactatctcttgctaattcagcctatacaccgccatcttctgcaaaaccttaaaaggtactaaacacaagtatttacataaaacgttaggtcatggtgcagcttataaaacagaaataaatgggctatattttctaattaaagaacattccatttacaacaaacttaatgaaatttaaggcgaaaggaaaatttcatagtaaattaagaacagagagcttaattgaatagggccatgaagtacgcacacaacctttcatcaccctcctcaaatatttcaatatatccaaatttataattaacataaatttatatgaggtaaatcataacaaagtaagcatactatatgctttaataaaccaaagtgtttattaaaaccagcctacatctggaaggtttcatattgatttgaccactttgaaccaaacctagccccaaatcaacagaacctaacaattatatttatttagaccaaaacatttactcacaacataaagtataggagaagggaatttcttcaggtgctacagaaaaagtatcataatgcaaagatgaaagaatattaaggacaaaaaaagcaaagctaatcctttataccttttatgtaatgaattaacaacaattttacaaagagaactttagctaaaaaccccaaaaccagacaagctacccacagactaactcatatatgtagcaaaatagtgagaagatccatgagtagaagtgaaaatctggtgatagccggctattcagaacagaatttcagttcaactttaaatttactcaaattttaatcaatgtaaatttaaatgtaactctaggggggcactcaagatggctgactagaagcagctagtgtgcaccactctcagggagaggaaacaaagtcggaagtaaatactgtctcttttaagtggatcatctaaaacagggatccccaacccggagccacagaccgtactgtttggcagcctgtggggaaccgaactgcagagcaggaggtgagcagtgggcgagtgagcatcaccacctgagctccgcctccggtcagatcagcggcagcttgagattctcataggagctcgaaccctatagtaaagtgtgcacaggacggatctaggttgcgggctccttatgagaatctaactaatgcctgatgatttgaggtggaacagtttcatccccaaaccagtccgcccttcccctctcgccccactccccacggccagaaatactgtgttccatgaaaccagtccctggtgccaaaaaggttgggatagcgctggtctagaagaccatgtcaggatttaccacggacgccagggaactcacagagaacagagagacaagccaggcagccaccttcctgggactggcatggagtgggagaagctccctaacatggtgaaacggtgagagagtgagagtccctggggaagccacacttcccacatggccctttgcaatcctgggcacaggaggaacccccaactcccatccctgggccactagaccaacacagaaagccacctagagtttttgcagaggcactgctcaagcccatgtggagcaccacaagccccggatccctgagcagcttggtgccagctgccataaccccagtggaagccgcagtcacagtgctgaggggcggtcagaatgcccagcccctcctcgccaggaaaggctcggcttcaccctgcccccgcctgagctccccagcacagcgaccctgtccccacctgaactctgcaggcaggcacagctccacattcccccaggaacctcccagatagcagaccatgcaacccctgccctacctcctctgaggcggctaaggctcttccagcgcagcaaccgcacctctgcagcaaccgcacctccgcctaaactctggtggcctgaggttctgtgttcctctggggcagaactcccagaggtaacagataacacttggcacctctgtatgccctaaacagtgaagttcggcattgtttggaagggagggaagggcaagcgcgccacgtgctccgcagctgtcagtctccattgcaggagtcctgctccagtgaaaggcccacagcacagccgccctgcccccacctgaacatttcacctgcagcccagagcccttctgaaaatccaaaccccacataccgtgatattcccttgggctcccaccacctaagtgttctgtaggaccctgcatgagagttcgaccagtgacctggaaaccaacctgtcccacctccccacatcatagccagcacctgaactctgggctagcccgactgcagtccagccccttcaggtctcacacaggttgtccagtgggccagctaggggcctggggggaactggggaactacttgccccattccaactctgctggcgcctgaccatttcccccagggcctgaggtcagaccaacccaaccagctgacaccagcacaacacccattcacacaggccctgtggaggaagccccttctacaggaagcagcagtactgtgacatcggaaaacaggtgacccttaaccaatggggaaaggattccctattcaataaatggtgctgggataactggctagccatatgcagaagaatgaaagtggaccctacctttcaccgtataaaataacttaagatggcctgatctagtacatgcagaagcctctgaagatcttaccattttctcattacattttgcaggtgtttcatcaattttcagagctactaattttaattttattacagttataaagccaccagccatatctaataccagacaccactattaattgcagctgtgcttttattactctctctcccagtactagcaaccagcatcaccatactactgacagaccataaccttaatatactttttttgatccagctggaggaggagatccaattttaggccaacatttattctgatatttttgtctatccaaaagtgtacattcttattttaccaggttttggaataatctcacatattgctacctattattctggaaaaaaaagaaccatttgattatatagaaataatatgacccataatatcaatttagctcataagctttatcgtatgaggctatatttacagcacggatagacattgatacctgaatgtattttacactagctactataattattgctattccaacaggagttaaagtatttaactgactagcaaccctacatggaggtaatactaaatgatctccagctatattatcaggtttaggctttattttcctgctgacagttggaggcctaacaggaactgttctaactcatcagcagacatcaatcctcatgatatatactgtgctacagcacatttctaacatgttctatcaatagctgcagtcttcaccatcacaggatttattcactgattcccatattttcaggttatacactcaacctgagccaaaatccattttgtatttgtaggtgttagcttgactttctttccacaacattttcttgatttatcaggcatgccatgacaataactacactgatggatatacaacatgaaataccatctgctatggtttggatgtggtttgtacccaccaaatctcatgttgaaatttagtccccagtatggcgtcttgggggatggggtttagtgggaggtgcttgggtcatgggggctggtccccgagaacagattaatgccctccctcaagggtgactgagctctcgctctactagttctcaagggagctggtttttaaaaaagcctgtcacctttcccctctcaccatgtgatctctgcacacactggctccccttcaccttccatcatgaatggaagcagcctgaggtcctcaccagaagccaaacagacataggtgccatgcttcttgtacaacctgcagaaccacgagccaaataaacctcttgtctgtataaattacccagcctcaggtatcctttatagtaacacagtatgaactaagacacctattacacttgaattagttccactataacactttgaaaagtgaccagcatctatgtttaaataccaaaactagaaacatccacataatttttttcaataattctagcattatttacttcaattgaaatttttgaaatatgcctattcttaaaatccatcaccaaagaacactgaagccttaaaacgtgagacccccttgggaaaaagacaagctaaaatttattcacatctttcactattcctacaataataggacaatttatttatattctaatcatttcattcccaaacatcatgtttcctacccccaattgccaaatccataatagattagtctctttttaataatgattagcacaacttgtactaacataataatacataatgtcaaaggatgttattaccaataacagcaacacgtcttaaagcacactttcaagcaaccgtcctttttgaccaccaccactgaagttaccagatcatttacctttataccacccctccagcattttatctccatttctttctttctttcttttttttttttttttggagacatggtcttgctctgtcgcccaggctgaaatgcagtggcgtgatcatggttcactgcaacctcgacctcggggctcaaatgatcctcccaactcagtctcccaagtagctaggaccacaggcatgtgacataatgccctgctaatttttattttaagtagagatggggttttgctatgttgcccaggctggtcctgaattcctgggctcaagcaattcacccacctcagcctcccaaagtactgggattacaggcttgagccattgtgcccagcctaccaccattttaaagattctcctgtgaaaaaaaaacaaaaaacaaaaacctctcctgattctgtggttcaccctgcagtggacaggagctgcagggtgaaccaggagaatggcaaaacttctcaagaggtatgcatgcttcctgtctataccttttgcttttctttctctcctaccaccataattaacattttgccatatttccttcctaaatttgttccatggatttttatgtagttgaaataatactgcatatataaactctaatcacacttctttcccctaattattacagtgttcttaaaaccttctaaaatattgtaaactctatttgtaactttgagggttcctcaaatgggccttcaacagtgcctggtgagttaattcactgtcccactctagtttttattgttgacttacttctttctcactctcttttaaatactccacaatgaggtttttgttcctctcattgccaaacccaccttgtcagggtcaccaacacccttcatcctgccaaatccaatagccaattttcagcgttcctcttacttgaactcctagcattatctctctcagctaactgcttcctccttttgtcagttggcttccaatacactgcattccctcttcctaggtcacaggttactcaggttagtcctcaatttcctttgctagattgttttcctgactgaatgttggaacaccccatggttcagtccttgagctgtaccttgccttccgtctaaaccaattcgctccataatctcattcagttcctcggtacagagagtaatcccatatttatctcttcagtcctgactatcccctccacccacaggcttccaaatgcttatctaacttcaccacacagatatctaatgagcatatcaaatacgtaactcttgacttccttctccagccttccaaaccctgatgcctctattgccaatcttcaaaataactccattatgaaggtattaattctaccttcaaaatatagcctgttctcatcacctccacatattaaacccaattccaagccactgttatctctagtgtgaacttctgaactagtcctctcattagtcttcctgctttcatttttatcctcactgttcacatagcactcagtgacctctaaacaaagatcctttacttgtctgcaaaaagtcagccaggggctccctatcacacttagaataaaatctcactgcttgcaacaaccaacaaggtcctacatgatttgacctctgcctatttctctaacctcacctcaaatttccactttcagtagccacactggccttcttgctgattctcaaacaagtgaagctcagtttctctcaggatcttctcttccctctgcctgaacacacctttccctgatttacagccaactttattcaggtcttaattcaaatgttacctcccctgagctatcattcctggtcctcctaacctatgaacgtagcaagctctcagtacgtatgtgctggctagagatacttatccaagtttaactataaaagagcaaccaggaaaaacgtaattcaaaaaatagataaaagcattgtccccaaaagagatcagaccaaaggtagctcccttattaaaacaaaaagggaatgtaaaacagaagagtggcaaatgggagttgggagggaggttccacggggaactcacacacataaccttcctgctctccctatgtctcaagccttctttccacaggcctttgaagagagcttcaggcacacacctcaaagtgctgccacctacggatcagctgtattattagcaatagctgacactgtgaccagcctttattcacctgagctctgtctttatgtcatggttctcatcagcatccagggctcctttccttgctccagtaaggaaagtatatttggcttagggactgcacatacagcttaaaagaaaggaaatggtgcatggtcatgctaggggattcccagattcaaatctagtccattggcatcaaagaagggagacactgacaggaagtgacagagaaagatgtgacagtctaaaggataagagataaaaaggtacacggtggagctgtccatttctacttctactcaaacgtaagcctttccttagggaatggagatcagaaattcacaatgaatgaggcagaaattatggggaacaaattctgaatattacgtaggatgatcttacccaatgagatcaggttgctgtagttctccaacatcacatccctgtacaagtccctctgagcagggtccaggcattcccattcctcctgagagaagtcaatggccacatccctgaaagtcaccaacaactgaaacaacaaatccattacaggatgattctacaggaatgattctgaagtgaaatgagaagaaaatggaggaggtaattgaaggaagcaagtaacacaaaacaacaggaaattggttgcctaaacagtagtattaacctgattctctatcattcctattgccacagataaaacttcctctgtacaatagaacaattccattatccagaaaggtctgagaatttaaaaagccagatgtgtgcagtttcttgattaaagaaaatactgcaagcgttttcttcacaacaggttttaattgcacagcagataaggcttccaaatcctcaataactaatatactctcaattaatacaagttcttgctctcccttctgcctttaaatacttttaaaaagatgaatttttttccaaacaatgtttaccaaatctctaggttagaaaataaaatttgaatataacctaagaattttttgaagactcagattcatcaagttatattatgtcacagaacagaatggacatatttccattttacatacaaaatgatctgcttatttgggagtatctgaattagacaaattctcggccgggcgcggtggctcacgcttgtaatcccagcactttgggaggccgaggcgggcggatcacgaggtcaggagatcgagaccatcctggctaacacggtgaaaccccgtctctactaaaaatacaaaaaaaattagccgggcgtgatggtgggcacctgtagtcccagctactcgggaggctgaggcaggagaatggcgtgaaccctggaggcggagcttgcagtgagccgagattgcgccactgcactcccgcctgggccacagagcgagactccgtctcaaaaaaaaaaaaaaaaaggaattagacaaattctctaatgtctttgagctcttagaatctataattcttgagagtatgcatctggcatgttttatttgctcctattttccacgttcctaggctatagcaaggtactggatgccagtccaggcacacagagacatcactctgaactggtacattccgggaaatcccaaggtgaacttgactatgatcatcctctctcattggttcctgggcaagagggttgtagaaggcagaataaaggccccccaaacatgtccacaacctaatccctgaaacagtaacagtactgactcaatgataaagaaaagcttgcttgcttaaatataattactttgcttgactttgtagattattcagtaagaacagtctcaggaaaacaggaccttcaacagagataagagaattaaaatatgcagactaacaactctgggaatgggctgaccagcctgataagaataggctgatggcacctacagaaggccacaaaacactgaccaagaaagcaatgaccaacaaagcaatgacctgagactgcacatttcacaagaatgttttgatcatcattttttctaatttcccttaaaaacccctgatatggagacagaactcggcggtctttgaacactagttcactgcctcccctgggttgttggattcctgaatagagctaaccatcctttcaccaatgctcatctcttaaactttcaagtgacaagtggtctggacctgaatttcgttacaaaacctatgtataccttaccttacatggcaaaggggactttagaagtgcaattaaattaaggatcttgagagggggttatcctggattatctggttgggcccaatgtatttgtaagtgatagagggaggcaggtgagtaaaaaaaggaaacgtgatgatgaaagcacaagtcaaaatgtgattgctggctttgaaaatggatggaagccacaccccagggatcgtggacagcctttagaaccagaaaaggacaaggaaacagattctccagtcctctagaacctccagaaggaacatggctctgctaatactatgatattagccctttcagactgatttcagacttctgaccagcagaggtataaatcataattatattgatttaagccactaaattagtggttattagtaacggcagcaacaggaaactatatcagcaacaagactccttccttcatagaacccaattcccaaccaattttcaaactttcacagaaaatcttgccacacactgagactaggaacatccaacaaaaaaatgctatcactttcaaatggaaaacccaggattgtagagaagatcaaattttgtcatgtatcacatttaaacactcatctctacctcaccaaaccgtggtactaatgtgtaccaatcttaaaaggaggtatttctgttccctcagagctctgggcagaagactatgcctgtggacaatgtagaattatctgctgaatgaatatctgaaaactgtttggagaggggaaaagcattgagaagaattgggctctttgctactattactcgctagaatgggagacgtttggaagcagttcccttaaggaaccaaacaaggcaggaaattctgggataaatctggtgttcacattacacaacaaaatgattgtacttcaagaaggaaagaaacagcaactcacgtggggcatggttttttagaactgatcaattttctgggttcttctcctggaggtgtgcaaagtccagagaagccagtgctggacaaggaaaagaagccacaagattagacttggctcacagcccacaaaataaactacttagaactacctttacttctcctcttttgggaatttggaaaaaatctcagttcttccacaaacccaatggaagccagctactgcagaaggggttcaggcagacctttccttaatgtccatgttgaacaggaccctaggtgctgttactttcccatggcatctcctcttccacagtagaacagaggcatgcccagggagccccccaccatcctcctggacccaaacactaagtcaggtactttgctcccaatcttaggaaggggcttcagagaccaaaatgtggccttctttcagacgtcatgaacatcagctagactcacagacattttgacagacatatcagggtcaacagatccaaaacagtctcatcccactcccctgaatctagttctttcttgcctgtttactcttccctataaaagaaaattcctttatgcctgacctttgctatgcttgcagatcttatggctggagtattctcccaattacaacacctcctcccttactgcagtgttcctgtgaataaagtcattccttaccaaagtctggatttgtttttttatttcacaggttgaataacttttgtagaataacaaaacaaactattttaactgtaacctaattctccaagccatggcacacacagaagcacggagggtcaaacaggagcaacatccacatgacagccaatgtgcgcacagcacgccccctcttgcaatatgacttcaagattgagcaagttccccaactagagccacctacttgccatagttgtgtagcactgatcttttttttttttttggtagcattgatcttgcatacatgtataatccatgaacttaacatcaatgttacttgtgtgataccaagaaaacccagtaagagagcaggtaaataatttaagtaagattttgttgggtatagttgagctttgaagcaccataagccattgtactaagattttgtcctccccgctaaccaattttcacctcctttgaggcaatatcatcgtcattaagaatacatgggttggctgcacgcagtggctcacgcctgtagtcccagggaggccgaggcaggcagatcacttgaggtcaggagttcaagaccagcctggccaacatggctactaaaaaatacaaaaattagccaggcatggtggcacatgcctgtagtcccagctacttgggaggctaaggcagaagaatcacttgtacgcgggaggtggaggttgcagtgacccaagattgcgccactgcactccagcctgggtgacagagcgagactccatctcaaaaaaaaaaaaaaaaaaaaaaaaaaaaatcccatgggttaaaataatatatataaaatgatataaagatgttaacctctgcaagttaataggatatttgacatatgatatacaaattaaatatgaccccaataaaagtacaagtatgaaagcagatacattcaatttaaattcaacaagcaagaaaattaaaaagcaagaattggaaaaaaatgcctgataataaagagaacagagatttcaaaataccactcctatcattaaaatgttggatactgtaaaaaggaacaaaatcatatcctctgcagcaacacagatgtggctagaggccattatcctaaatgaattaacacagaaacaaaaccaaataccacatgttgtcctttataactggaagctaagcactgggtacacctgaacataaagatgagaacatggacactggcaactactagagcacggagagaaggaggagggcaaaggagcaaacctacctacctatcaggtatcctgctcactacctgggtgactggatcataccccaaacctcggcatcacacaatatgccatataacaaacctgaacatgtaccccctgaatctaaaataaaagttgaaattttatttttaaaaagttggatactgcatatgaatagaaagaaaagattaatgtaactgaatagaatctctgatctctggggaaaggtggattattcagtaaatgttattggagaaaggtaaaattggaaccccattttataacacatacccaaattaactccaaatatataagatatctaaatattaaaaaatgaaattggcagggagtggtggctcatgcctgtaatcccagcactttgggaggctgaggcaggtggatcacctgaggtcagcagttcaccgtcagcctggccaatgtggtaaaaccccatctctactaaaaatacaaaaattagctgggtgtggtggcgggtgcttgtgatcccagctacttgggaggctaaggcaggagaatcgtttgaacccagtaggcggaggttgcagtgagccgagatcatgccactgcacttcagcctgggcgacaagagccaaactccgtctcaaaaaaaaaaaaaaaaaaaaatcacaaaaatgctagaaggaaaaacagactgttccttcttaacttcagaggggaaaattctgtatctcacaatcatatgaataaatgttcctacatttaaaaattgcctaaaagaatacacagacaaatgacaaaatgggagaaaatatgcgcaacttaaataaaaaacagagtcctaaaatccaaagagctgtattttaaaaatcgagggaaaacaagagaaagacaaaaaaatcattattttaaatggacaacagacaattcataaaaaaaaagtcaacggtcattcaacatgtaaaatgctcatcatttaaataaagagaaattcaaattgaaacgaaattgagaagacttctgaatccaatatcattaagatcctactggactaagttccttgaagatacacctatcagatctggacataatacaaaaagcaactaactgaaggtgctggccaatgaactgaagcagtattcctacaaaaaaatgcaaaaattagccaggcgtggtggcgggcatctgtaatcccagctacttgggaggctgaggcaaagaattgcttgaacccgggagttggaggttacagtgagccaagatcgcgccactgcactccagcctgggcaacagagcaagactccatctcaaaaaaaaaaaaaaaaaaaaaaagcacacttgaattgaatcatgaggaaacatcaaacacatacaaactgaggaacaatctacaaaataacaggcctgtagttttcaaaaaagtcaggatcacaaaggatcaaagaaaagtccaggaattgttttccattaaaagagactaaagagatgatttaattaaattaaatgtttgatcctagatatgattttggattggacgccagataaggggcaaaaaaaggctataaggagctgggcatgcggtggctcatgcctgtaatcccagcacttcaggaggccaaggcgggtggatcacgaggtcaggagatcaagaccatcctggctaacacagtgaaaccctgtctctagtaaaaaaaaataaaaataaaaaaaaattagctgggcgtggtggtgggcacctgtagtcccagctacttgggaggctgaggcaggagaacggcgtgaacccaggaggcggagcttgcagtgagccaagatctcgccaccgcactccagcctgggggacagagtgaggctccgtttcaaaaaaaagaagaagaaaaaaaaagctataaggacaaaattgtaacaattggtgaaatttttctatgaactctggattagacaattattacatctctgctacatttcattttaataaatgaactatagttatagtcccctgtgctcagaaaatacactaatataattatagataaaggaaaatgatgtctgaaaattactatcaggtagttcagaagtatatatgtagagagaattagcaaacaaaaaagcaaaatgttaaaaactggtaaatatgtaaggacataggacagttttttctattatttttgcaacttctctgtaagtgtaatattatatcaaaataaaaattttaaaaaaccaatgctatgtgagtactgatttttaattaagagactaaagaggcataaccaaatgtaatccatgaaccttaaatatagcaaaacataaaaaccaaaagaaatctaaaatgcattctctatcttaacagtagtgacagttactgttgttttcaaacaattatattttagaataaagaacgtaaattatattaatgttttagcaaccaagattgttagcataaaacagagatacaagtataaaatcaaacaagaaaatactctgtaatttgtctgaactattattataaattcatgattcatgatttatactttaaaaacaagttattagctttgttccctgaaatggcctagaataaacgacagccttatggcaatgagaaactctaatgcccagacagtggtcactgtacactgtataccacaagaggaatcagaactccttagagaaatggctcatttcagggctggcacaggaaatgtagaagttgatcttgggatcatttgttctgccagaaagcaaataagctatcaactctactagaatcatgacagaaagacacagaactgcctggaaaggactaccactggcttaaaaaagagcagtttgatataaaaaagaataatgatcacaatagttcgaaacatatggtattcaaaacagacactcccttttgggactccttagaaggttgtagggcaccaactcatttctctgaaaatatataaagggaaagaatcaaatcaattactctgcctttccatatgaactgtatttatttatcttgagatggagtttcactcttgttgcccaggctgtagtgcaatggcgcaatctcggctcaccacaacctcggcctcccgggttcaaatgattctcctgcctcagcctcccgagtagctgggattacaggaatgtgccaccatgcccagctaattttgtatttttagtagagacggggtttctccatgttggtcaggctggcctcaaactcccgacctcaggtgattcgcctgcctcggcctcccaaagtgttgggattacaggcgtgagccaccacacatggccatgaaccgtattttaagataaccaaatacttgatgaaaaaaagttcttatatatagaagaactgtaactaatgaatacaggaggaattgagagaatttttttttaatcaccatatataactgttaatgaatgggccaggcgcggtgcctcacacttgtaatcccagcactttgggaagctgaggtgggtggattactcgaggtcaggagttgcagaccagcctgggcaacatggtgaaaccccgtctctactaaaaatacaaaaattagccaggtgtggtggcacatgcctgtaatcccagctactcgggaggttgaggcagaagaaccttttgaacctgggaggtggatgctgcagtgagctgagatcacaccactacactccagcctgggcgacagagtgaggaaaaaaaaataaagaatggatcttggtatcaatcataagtggacgttataacctttaggtcagtgcttctcaatccttctaaaatttttcacggtcatatccctaggaacctttttagatacttttctctaatagccaccactctcatgaaattttattaccatagatatactgtatatatgtttatgtactgtggccctttggaggaccacagatcattgtaatacctatgagtttttgtcctcttccttctcaaaaaccaagtttcacccacttggaaggtgatatcctccaccctcattgagaatgcatgctttaggtgaaaaaaaggaaaggattaaatggacagcatttaaacacatcaatatgacatcactgaaagtgggacatcagactgtaagggcctcatgatgtgatgtaataggaagtacacagcaccaactatgaattaaaggtgatttagggaaaatctgatccaaattccatcaaacctctagatctaactgcctgtttacagaaatatgaaggaacggaaaacaaattataagacagtacaaagaagcaattagctaaaagcagtatacagaatattctacgggacagatgatctagtttttctacaaatcaacagcaccaattaaaccaaaacaaaacacaggagggaaactatcatgcattaagtaagtttaacaggtttggccaccaaatgcaatgtgtggactctatctggatccagatttgaacacacctattgtaaaaatatgtctttgaaataattgggaaaatctgaatatgggggtatacaagattatgaaataaccaccacgctgttacaccaacataagaaacaaatttattgttttaaacttattgttagtttttttttttatgttggtataacagcatcatggttattttaaaatataatgtcctttttggtaatatatgcttataagaggataaaatacaattttgaaatactataggaaaaaacggggaaggattgatacaaaggtatttacaaatgtttttaattacagctaggtgttgaacatgttggggttcgtattattctttagcctgcttgaaaacatccacaataaagttaaaattttaaaactcttcaaatttcccccagaaagtacagttatttttcatcaaaaccttagaccaggccaggcgcggtggctcacgcctgtaatcccagcactctgggaggcccaggcgggtggatcacgaggtcaggagatcgagaccatcctggctaacacggtgaaacctcgtctctactaaaaacacaaaaaattagccgggcatggtggcgggcgcctgtagtcccagctactcgggaggcttaggcaggagaatggcgtgaacccggaaggcggagcttgcagtgagccgagaccgcaccaccgcactccagccagggcgacacagcgagaatccgtctcaaaaagcaaacaaacaaacaaaaaaatcttagaccagaaaggactgctgtatcattgggtggaaaggagaggtgtagtgtggctggggagtagagctaaactgatgatcccatccccgcagcatcatttatggggtgcctaaggaccagtcactagcatggctggttcttccttaggaagatgttgctggaggtagaaaacgtttcggaaaggaagaaatttgaggttagaaagaaaacaggaacttcacacaagactttcagaagtgcgatattcttttcctctgggtgcctctcttggaaaacgcagaaccgagaaaagaaataagcatcatagaacatcagagctctcggagcagacgaaacaatttaggataacaccaacctctagaaagggattagtcttccccacagggctgtcaagctagaataggacatctttaacagtggtcttcttcctaagacacttccaggggtaaagcctcaccatcagggaaacttcaaaaagagcctcttactctgcaaagaaactgcagcagctgtaaccgcacgattctcagctggcttaatgatgtccgtgtcacacgaggagtactgcggcccgggaggggccaagcgctaggagcattaacaggcggcaggtgagcccaccccgcggccgcacaagcgcacacgcacacgtccagggcggaggaacactactagtaacacccgcctccttctagcctccctatcccaaagttatggtgccgattttgtccgcggcaggggctccaggggcacactcataaattcggtgcggaggaacacaactagcagcaccacacccccgccactgccagaaccaaagtgacggtgccgacacccctccgcaagcgcaaggccgacttccataagtaattagccagagcaccgtcccgttcctgtcagcaccgagccccagccaggacaccggtattcccagcaccatacaagaactactttttcgatgaagcaacccaaaagctgcgagcggttcccggtgaggccgcccactcacctggccggcgcagacaagctccgtgcgtcaagacataacagcgtaagtgtacgacgttgcgcagcgacgcgggggccttcgggaaatgtagtctacaactggaaaccggccggatcgtgtctgcgcaggcccagcagctaagatcgggtccggcgctccagaacagaacgatccctgaggctcccttgctcgaactgtgggacttaccctactatggtccgagcctaccctatttcattatactcaagtaacgccccagaaattccagagaatctcacacaaagaggttgagtcttgccgtggtgccttcaggggaatgtcatcccgggctagaagagctgcaaaaggctgtcaggtaaggtctggatttctctctgacagctctggccgtgacgcagtggccacgataccgggttgctgctcaacggggttcggaagtgtgacgcattctttgcggccatgtgtgtgtgtgtgcgtgtgtgtgtgggtctgtgcgcgcgcgtgtccgagtgtcctctgtgggtgcagagtgggtagtggccatgcctgtgtgatgtgcgtcagattatgcttgaggctattagtggcgcatttagtattgtgtgcggaagggtcttgggaatggtttgattatagctttgagggtgactgatgtctgtttaatcagattcagcctgcgactgagtatcttataacctgtaagaaattgatttttctttgcatggtcatgaatttaaaatagattcccatgaaattatataaatgtagtgaatgattcattgagagttcgcctgtggcagtgaatgtggggaaagaagtgtgtgagcataatatggtgagaatgagcacgattgtgtgcagcgctgtattatagtgatatctcctggcttcagttttctcacctgtaaagtgagggtgtcagtcgtgtaacgctttggaacaatgctttttaataggaatttctgcaaaactgagttccattttttatatctgtgctctccaatatagtagccactagctacatatggctattgagaaattgaaatgtggctggtttgactgaggaacgaattttttaaattgtgttcaattttaataaatctaaatgtaaacagctatatatggctaatagtcttcctattgaacagtacaacctggagcattaatttgccttcaagatttgaagggggtaaaaacttaattcatctagcaaatatttgaaaatgaaattcttaaaacttccttaaatttttttttaaatttgagatgattgtagattcatatgaggttgtaagaaataatagagacattgtgtgttatcttcaacttagtcttctccaatgacaacatcttgcaggactgtagtataatatgacaaccaggatgttgacattgatagtcaagatagatcatttccatcacctcgaggatctgttgtgttgcccttttatagacaaatgcactttcttccctcttgtttgaagatattcgcgtcaacattaatgataatgtaggcatacctcattttattgtgcatcattttattgcactttgcagatactgtatttgtttgttttaaagagacaggctctcactgtctcacccaggctggagtgcagtggtgcagttatagctcactgcagtctcgaactcctgggttcaagggatcctccagctggcccacaaagcctgaaatatttattatgtggttctttgcaggaaaagtttgcagactcccaatctatattatttctgatggctactttattttctattatatggatacactagaatttatttaacctgttctttattgaagtctaatttatgtttgtatctagctttttccattttaaaattagtctatctgcacctgtctgcatatatcctagtgaacatatataattattttccttagacagggtcataggagtgggattactgaaacatctggctcatattattaaattctgctaatataaatttctaatttaccctctttaaggtggcaccagtgtataacatggcgtgagggcatctattttactccagtttaacatgttattatcagtctattcaatgttcccgtgttgtaaatataaaatgctatttgccactttaacgtatattatcttaataagtagcaacatttaatagcttttagtcattaaacccaagtcattattcacgcttgggttttattaggcgtaataagaaattctgggtatcagtgacaagagcacagttgaaaaagaactggctttgtagttggagaattgtggattcagaactcagatgtcttgtttattaacagtggatttaggtttctgtttttctgatgttgaagtggagataataatgacattgtagaactgttctaaggattaaatagctatatataaggtatgcatcacataaaagttgattttttttttattgcttccagggccataaatttacttctccctctagtttgggtactgagggagaagggagggtgaatgatgtcctgcagggaccctggggactcttctgattgagggaaatggggagtggtgagccctgaggattgtgggagttccagttcaggctaggaaaagggatcccagtgtgcaagtataattttgcaatgataaaggccatcatggattgtctatgccagggatcagcaactgtttctttggttttttgtttgtttgtttttgagacggagtttcaatcttgttacgcaggctggagtgcaatggggcgatctcagctcaccgcagcctccccctcccagattcaagcgattttcctgcctcagtctcctgagtagctgggattataggcacgcgccaccacatccagctaattttgtatttttagtagagacggggtttctccatgttggtcaggctggtcttgaactcccgacctcaggtgatctgcccgccttgacctcccaaagtgctgggattataggcgtgagccactgcgcccagccagcaaatgttttttatagaggaccaaataggaagtattttaggctgtgtggcccatacaatctccattgcaactactcaacttggctatggtagctttctgaaagtagccatagtcagaagtaaacacatgagcatagctgtgttccattccagctttatttacaaaaacatatgggcgggccagatttggcccatgggccataggttgcaaactcctagtctgttctatctttcgtttttaagtctggggaggccaggaagctcctaaggccatgaaggcagtctgctttggataatgtggtctgtcccctttggatggtgagaattgagggaagagaatctactctgggcaattctgaacatcccagccttgggcctagatcagtatcctcatagtggggattggcccagaactctcctgctgaaatattggtcatgtgttctaatgcaggataacctctgcactgtgtccatcctcgtacagccaggttcccttgctgtggtgagtgtgtcggagggaggtgagggaagtgtaggggaggtatttgcaagcaacagtggaaaataaaagattattaatttatatcatattgttacctctgaggcagacctagtctcactgtctcatttttttctcctctaactcaggcttctcagaactttgcttctccagcagaataatcctgcggaagactgagcagttcttgtgagtgtaaaaccatggcccatgtaagtcacagtttctctttcctttttagattattttgtttttaaagatcatgtgaacattttcactctttatgctgacacttcctaagaattttttcttcatccccacatttccaagctcctcccatgggccccctctcttttctaaccagtatccacatgcacattgaccaactcattcagggtactcagtctctgtctagggcagagatggaacagacatgaagttcctagagggggaggtactttaccatcctttgtcagatctgaggtgtaatgaaaccaagaatggaatcatttgactacacgtaggaaagcactgcagttttccacagatcctgtgtctgtagataaatgcagtttaatattgattggcctcagtttcagtatgtggttggggcctgcttatagagaggccaggggatctttcctgagaatctctgaggtgaaaacccatagtaagacgcattttgtggttaaacggaatgtgctagtcttgacatcagtatgattctggttcattacatcaatattcttaatctcaagaaaaaagaaggtgtgtagtacttataagaaaatcatccagatacataaatattagttaattgtattctcccagatttgcagtgaggtactatggcctcgaacttctgagttcaccactgtactccagcgtgggcaacagagtgagatctccgtctcgattgatcaatcgattgatcgatagatagatagatagatagataaacttaaaggaaaaagaggatataggattcttttttatgtattaagtggtttttcttaaagtatttattattaagtaataatttattgagaatttttgaggtagaaatatagtttatttgcttgtatccactgtttaattgaattgggaaacatttatttgttcccagaaatgttttgagtagttaaagaaccccataatatacaggaaattttgcatatagtggctggattcttcaagaaaatgaggtgactctgctttagaacacctggttcctttcttctatctttatcataagctttcagccccagcctagagtttagtatagtaccccttgctgcaatgaaaccttttatctccttttcttctttttaaaatacttgttctgtaatttcaccagtaatatgttggtttatggtttcaggcattggtgacgttcagggatgtggctatagacttctctcagaaggaatgggagtgcctggacactacccagaggaaattgtacagagatgtgatgttggagaattataataacttggtctcactgggtaaggtcacctatgtcaaataatgtagactctgttatctgaaatagtagctttctcttccacaaatttaggactaattattaagaaactagctgaatttcttctctcttcctcaaggaatggactgaactttgatggtttgtgaatggcacttccactaaatgctttcattttcaccatacctcactgagcctcatgaaatgttccttaatccattactgtagttacttcttccttaatagttaagagactggatttgaattttggggcatttactccaaagccaatgtcaatgaaatcaggtttcacattgcatttgagctcagaattgctatggatgctctgttatttggtaacatgcctataaggataacagccctacccagggtctacaatttacatgtcatggttcagaccaataacattgatttaaaattaaagtgaatgcattctacttcctaaaacaaatattttctcttactgatttgtgattgaaaattttacctattggacattatgctcagtacctgggtggtgggatcaaatgtacctcaaacctcagcatcacacaatatccccaggtaacaaacctgcacgtatggccctgtatctaaaataaaagttgaaattagttaaagtaaaataaaatttattaacttagcatctaactttaaatgaatatcttagcaagaacctagaaatattttaggaagcttcttgttttgctctaagtaaattaacaacaacaaaaataataatagctaatagagtgcttactatataccaggcatcattctaagtactagctacaagatacaaaagaaaaaaagaaaataaaaggtactacttttattttcattttacagatgaaaaaactgaggcccaaataatttaaccagtttgtttacaatcattagtcaataggtagtagagtagaatttggacccacatagtctggcttcagaggctatgccctcaataactactgcctctcaatagagccagtctgtatgagttttaattccaaaatgaattaaaattctcctagatgaattttaattcccctgcccatcaagtttctttattctctgggatcctgaggttacactaagttgaatattctttaatcctgtcagttttttccgaagtcttcatcgaaatcatgttgatccatataaatttaaccaagtctcaaaatgtttctgaatgtgcaatgttttatttctatatattcttttatttctttcttgtaagcaggatattctggctcaaagccagatgtgattaccttactggagcaagggaaagagccctgcgtggtggcgagggatgtgacaggaagacagtgccccggtgagttgagagttcatcaggcagatggaagccctcattgccagtcacggccagctggtgagggagcatatacaggctttgcatgctgtttagggagttactctcagaggcctcaggcctttggagtaaaggttaagacagggaagaaaacagatcatctgagcatgaactatcaaaagaacctcatcttggctcctacttaccacctgtctttgtttttgtttcccctcgtattactctccatttcagtaaagggaatgctctttcctagtgcaatcaattgcttcctatcttttctccattgacatgtgtgcttgtttctaatgcctaaaagttcagtctttcacatattcagcatatatttaccgagtgctcactctgtgccaagtgttatcagtgccttggtgaataaggccaaaacctccctacactaatggaattaacattgtagtagcagagatacatagtaaactgtaaacaaatgaatatataatattaaataatgatgcatgctatgaaagaaacctatgaagggtaaagagatagagtttgggcaggtttaattgaggtgggctgcccagggaaggctcttcgaagagagaatatatgtgcagagatgtgcagtataggcttaggccatgtgaatatctggaagaaaataattccaagcacagcagagaagtgagctttgtgtgtttgaagaactggaaaagctcagagcagattcagagtggggaagagtaactaaatatgaatttagagctgagcaggggccaggtcttatatggttctgtttatcatagtaagaaatttggatttttcttttccaagagtgattgaaagccataatcaaaaatatgtttttaaatgatcactgtagatgctctgtgaagaatatactaaacaggggcaagattggaagtaggaagatcagttatcaggctatttcagaagtctagattagcagtgaaggtagcttggattgggatggtagtggtgaggggtggtaagaagatgctgtattcatcttatgatttgaaagtagagctaacagacatgccatggggtatgagtgaacaagaaatcataggtgaacaagcagctaagtgtatataatttgctgagatggacatatgggaaagatagcttggaagatggaaatagagtcctgatttaggtatatatatttaaaatgcctacttgtcatcaagatcgagatgttgaacagagatggtaggatgagttatattaacttgggtgtccagccaatcaactgactggatgagatcacttagggctgatctgacctactacctgtttttgtaaataaagttttattgaaacgtagccatacttaattatttatgtgttgtctatggcagagttgagtagttgagacagaagtcatatggctcgcagtgcataagatatcgactgtctggtcctttacagaaagtttgctgattccctccctttagcgaatgagtttcatagaatgaagggagccagaggagaaagagactgaggcccagggcactctattcagagaaggaagaggaggcagcaagtagattgagaacaagtagcctggagagtggtaccaaaaaagtcaaatgaagaaaatgtttcaagtggaagggagtagtcatctgtgaggtcaactgaactgtaaactgcctataggatatggcaggaaagaagctggtggtgaccttgtgttaagaggacaaggtttcagtggagtcagaggtgaaaaaagcctgctagatgtggctgaaataaaatgggaggtgaggcagtgatgacagtgagatagaaaacttttctaatgggaaatctgttaggagggaactagataagaggttagtagctagaagaggatatgggatgtaaggagtcttttttttttttttttttttgagacagagttttgctcttgttgcctaggctgcagtgcaatggcatgatctcggctcactgcaacctccacctcccgggttcaagcaattcccctgcctcagcctcctgagtagctggtattacaggcgcctgccaccacgcctggctaatttttgtattttagtagaaacggggtctcactatgttggccatgctggtcttgaactcctgacctcagatgatccacccatcttggcctcccaaagtgctgggcgtgagccaccatgcctggccaggagtctatttcaagatgtgagattttaagatgaaaatgattctatagaaaggggaaaaattgtagtagagggaaggataattatggaaattggaggacaaggaggtaggatccagtgcacaagaaaaatttagagaactatagatacgacaatggatataggtgggttgattgatgtggtattatgtatttcttttcaatgcttcatttttattagaggaataagggagatcatcagctaagaattggcaggagggaaaggagagttatgtttgaggtgaaagatgtaaatatattttgaatactggtgttcagtttacttgcatctcaatagctcgttcactttttattttctgttaatcaggagttaataataataacagttaacattgattatttactgtataccagatttagtcatttcacaatgtatatattcttcaaaatatgttgtacagagtaaatacataaaatttatctgtcaatgtaaaaaataatgcatttttaaaactatgaagaaaaggctattaagttctatatagtatgttgattcctctatatcaagccaaattctgatttgtattttatttgcagattttttttagttgaaattcttgggctgtatataatcagatcatttgcaaatcatgatagtttttcattctttcttaaaaatgtttgcctctaaagttcttaattctgcttagttgttttgcttatcataattttataaaaaggataagataacttttctttttgctcttttctcgagtagctaaactaactttaaaattatctgttctttaaaactttgatagacgtctatgaaattgtttgcaaggataggtgtttcacaatggaatttcatttgcttaggctttttatttcttctgtggtcaatacaggaaattaatagtttccttaaaattttttattctggaatatacaggattattttgtttagagcattacatagagctttggaaaatagccttactttttttttttttttttttttttttttttaaggcggagtctcgctctgtcgcccaggctggagtgcagtggtgcgatctcggctcactacaagctccgcctcccgggttcacgccattctcctgccttagcctctggagtacctgggactacaggtgcccaccaccacgcctggctaagtttttgtatttttagcagagatggggtttcaccgtgttagccaggatggtctcgatctcctgaccttgtgatccgcccgcctcggcctcccaaagtgctgggattacaggcatgagccaccgcgcctggccagccttactattttttttcaaatcagctttattgagatatgatttatatagaataaaattcattaattgtatctgtttaattattttggacaaacacgtgagtcttgtaatcatcaccacttcagtcaagatgtagaacatgtctatcatgtcaaaactttccattatgtttctttacagtcagtacccttcccccactttcagctcagcccgtgacaggcaactaagttgccttctttccctaattttgtcttttctacaatttcatatcaaataaatcagaatatgcagtattctgtgtcatactacttctacttctgatatttatgcgattcatccaagtagttagaagtctcagtagttaattcctttttcttgctgaatagtatttcatatctgcttattagttaacagtttatgaacatctaagttgtttctagtctttcgcaggcatgaataaagctattatgagtgcttgtttacaagtctttgttttaatgtatgctttgttacctcgggttaaacacctgagggtgggattcatggattatataagtatatataagaaactgggctgggcgcagtagttcatgcctgtaatcccggcactttgggaggctaaggcaggcggatcgcttgagcccaggggttcaagaccaacctgggcaacatggcaaaccctgtctctactaaaaatacaaaaattagctaggcatggtggtacacacctgtaaaaactttatttaaaaaaaaagaaactgggctgggtgcggtggctcatgcctgtaatcccagcactttgggaggccgaggtgggtggatcacgaggtcaggagttcgagaccagcctgaccaacatggtgaaaccccgtctctactaaaaatacaaaaattagccgggtgtggtggcgtgtgcctgtaatcccagctacccgggaagctgaggcaggagaatggcttgaaactggaaggcggaggttgcagtgagccaagatcacgccactgcactccagcctgggcaacaagagtgaaactcttgtcgcaaaaaaaagaaagaaactgtccaaagtggctatattgtttggcattcccactagatgtccaatagctccacattgttgccaacctgttgtattgtcagtcattttaatcttagtcattttagtggatgtgtaggtgtatctcattgtgattttaatttgcatttaactaatgactagtgatgagcatattttcatttatttgtcattcctttttctcctttggtaaaaagtgtctgttcagaaattttatccatcaaaatttttagcaattttattgaggtataatttacataacataaaatttactcactgtaagtgcacacttggtgacttttagtcaatttatagttaggcaggaatcatgacaatccagttttagaatacttccatcacccccaaaacttcccttgtgcccctttgcagttaatcccttcttcaatctacagctttaggcagctactgacctaccttccatttttgttgattttccttttctgaacatttcatataaatgggatcatgcaatgtacagtcttttgactctggcttctttaacttagcataatgttctggaggtccatttatgaagcagcatgtatcagtgatatattctcttttattgctgaatatgttctgttgtagggatataccttattttacttatctatttaccagcgatggacatttgtattgtttacagtttggggctgttatcaataatgctactataaacatgagtatacatatcattgtgtggacatatgtcttaattcatcttagttggattcataggcatggaactgctgggttatatgacgaatataactttcactttataagaaactgccaaaatgtgttccaaactacctatatcggtgtaccttcccaataacaatgcatgagggtttctgtttctctgtcttctctccaacacatgctattacctgtctttttgagaacagccattccagtgtgtgtgtagtggtatctaattgtggttgatgttgagcaattgcttattagctattggtacatctttggtggaaagactgttcagtgttttgcccattcttaaaattaggttgtttgtgttattattgagttgcaagagttttaaaaatatattctgaatataagcattttatttacatatatgatctgcaaatactttctcccagattgcggtacatggcatgtcttttcattttcttaatcttattttttgcagtacaaatatttttcattttgatgaagccaaatgtatcttttttttcttttatgaattgtgcttttgtattgaagaactctttttctcatacaaggacacaaaaattcccattgatattatccattttatcttcttgatttgtaagagttctttatatatcttataatcaacttctttatcagatatatatattttgcaatattttattagtttagatactagatatatattttgcaatattttactagtttctggagtaactttctattaattaacaaactttatttttaaaatcagttttaggtttacaggaaaatttagcagaaagtacaggtttcctgtatactctctgtccccaaacatacacaccctccccaactaccaacaatccacattacagtggtacatttgttacagttgataaacctacattgacacatcattaccacccaaagtccacagtctgcattaaggttcactcttggtgttgtaaattctattaactttgaaaaatatataatgatatgtatccacaattgcagtatcatacagagtagtttcactgctctaaaatttctctgtgtttggcctagtcatccctctctccaccctaacctttagaaaccactgagcattttactgtctccatcgttttgcctttttcagactatcatgtagttggaatcatatagtatgtagccttttcagattggtctctttcacttagtaatatgcatttaagtttcctcaacatctttttgtgatggcttattcttttagcactgaataatagtccattctctggatgtaccacagcttaatcattcacctactaaaagacatcttggttttttttaagtattggaagttttgaataaagctgctatatgcatttgtgtgcaggtttttgtatgaacataagctttcattttatttgggtaaacaccaaagaaatgattgctgagtagtacgataagaataggtttagttttgtaggaaactgacaaaatgttctccaaagtggctataatatttttgcattcccccagcaatgaatgagagttcctgttgctccacatccttgtcagcctttggtgttgccagtgttttcgattttggccattctaacaggtgtgaagtggtatctcgttgtttttaatttgcagttctctgacattcctgatctctggtttggtgtctgacattaatttggagaaattctcattcattgttgcttcatatattgcttcttttcctttctctcattttcctccttctggtattttcatcatgtgtatttacaccttttatgcttacccccagagttcttggatatctgttctgtttccttcagtattttttctctttcttttcagtgttggaagtttctcttgtcacatcttcaagtgcagagactctcagctgtgtccatttactagtgagcacatcagagccattcttcatttctattacagtgtttttgatctttagcatttctttttgattctttcttagaatattcatctctctgttttcattatccatctggatgttgtctattttttctattaaagcccttaacacatttcttatagtcttttaaaattcctggtctgataattccaacattcctgccatatctgactctcattctgatgcttgtttagtctcatcaaagtgtttctcgccttttagttttccttctaattttttgttggaaggtgaacatgatgtactgggtaatgggaaacatagtaaataggcctttaggagtgcagtgataaggtttccgcagtcccagaattaggtctcagtctttcggtgcacctgtgccacctgatggaccttaaccagtgcttccagttttttccccatcgctaggtgtgacaggatagcttagagggctgagttgggtattttcattcctctatatcattaggctctaataaaaccccagcaggttatgatctatctacttgagaaaataccctaacctcaggtgatccacccaccttggcctcccaaagtgctgggattacaagcgtgagccactgcgcccggccagtatttagatttttttaggctcttttcttatttagattgccaccctccagctttcatttaacttatctgtgttaataagattccttgacacttctagtctcccagccatctcttcatactattcagttactctgttctccctaaaattgttgagtttctttgttcattttttccagaaaccattcaacatggcacatacctgttacaatatctatacaaatcatttaaatacttctctatcaagtataggaatggttggttttagatgtaagagaacagaagagatatcatctgagaaagcttataaagaaagtacagtgggccgggcacggtggctaacgcctgtaatctcagcactttgggaggccgaggtgggcggatcacaaggtcaggggtttgagaccagcctggccaatatagtgaaaccccgtctctactaaaaataccaaaaaattagtcaggcgtggtggtgggtgcctgttatcccagctacttgggagactgaggcaaggagaatcacttgaacctgggaggcagcggttgcagtgagccaagatggtgccactgtactccagcctgggcgacagtgcaagactctgtcttggggggcaaaaaaagtagagtggccgggcgcagtggctcatgcctggaatcccagctctttgggaggccgagacaagtggatcacctgaggtcaggagtttgagaccagcctggccaacatagtaaaaccctgtctctactaaaaatacaaaaattagctgggtttggtggcatgcacctgtaatcccagctactcaggaggctgaggcaggagaatcgcttgaacctgggaggcagaggttgcagtgagccgagattgtgccactgcactccatcctgggtgacagagtgagactccatctcaaaaaataaagaaagaaagaaaaaaaaagaaaagaaaaaaacagtagagtgagcatccagtaggtggctgaataatagtaaaactcagctgtgtaaacatacatctctttgcacaggaggcagtgaacaacaggattggaaacatctctgtttaactggatagccatttaaaggatgagtaggcaaaacaagggctttttcattttatacatttggttgaactaccttggatttacttttgttctgatctgtaaaggaagtaaggtaggaaagagtgcatttaatcactgtaataaggtgagagagattagagctcctttgtaattgttacaaaaatataaaaattaagtgattgtcctgatattcagctgtcctatacatgacttatctgtcattcatcatcataatttcctttaagacaatgattaatttattgtacagtcagttgtttaatgcctgctgtatgctagtgggtagttattcactgttgaatgaaataaggattacatcttcctttgggaaggtttagggatcagaaaatcaacaaaagagcaaaaagaaaaatcagtggatatgcgtttgaaaattgtgaaatgaagaaatgaaacatgatgctggaattgagaataaaggacatagactgccttacagtcggtagggcaagcctttctgtgtaagagatatttaaccaaccattaagaatgagaaggagttggcctttcacagagccctggacagattatttttaggagatgaaaaatcccatagaaaactatatgaaatgggaaatgttatgacacaatcgaggagctgaatagaagcaagtcataataagagggagtaaggaggacaatgtctttgaaagaggtctttaggtaaccaaagaccatattatattatatggtaacatgtttggattttattctaagagtaaagaaaaactgttaaaattgttaagtggagattctcaaactttgatctatatcagaatcatctagtggagttattaaaaattcagataccaaattactcctgtagatttggttcacttgacttgtgtgtaactaaatagcagtatttgtgataaagttccccagatgattctcatacacaataaaattttagaaccactgacgtaaataaactatttgccatatcaccacaatcttatataatcttttttttttttttgagacagagtttagctcttgtagcccaggctggagtgcaatggcgcaatctcagctcactgcaacctccgcctcccaggttcaagtgattctcctgcctcagactcctgagtagctaggattacaggcgcctgccatgatgctcggccaattttgtatttttttttttaggagaaatggggtttcaccatgttggtcaggctggtcttgaactcctgacctcagatgatccacctgccttggccttccaaagtgctgagattacaggcatgagccaccgcgcccggctataatctctcattttctaagctcatgttgcctaatttcaaattatataactttattgaaatattctttaagccactgacttctagtaagaaccgttttcactttgtttcctattttgaaaatgtaaactttatgttatgctggctacaggaaaataatttttgtttgcttttatgttttctttcaggtttgttatccaggcataagaccaagaaattatcttcagaaaaggacattcatgaaatcagtttatccaaagagagtataatagaaaaaagtaaaactcttcgtctgaaaggatccatttttagaaatgagtggcagaacaaaagtgagtttgagggtcaacagggacttaaagaaagatctatcagtcaaaagaaaatcgtctctaaaaaaatgtcaactgatagaaaacgtccctcttttactctgaatcagagaattcacaatagtgagaaaagctgtgactcacacttggttcaacatgggaaaatagattctgatgtgaaacatgattgtaaagaatgtgggagtacttttaataatgtctatcagcttactctccatcagaaaattcatactggtgaaaaatcctgtaaatgtgagaaatgtgggaaagtttttagtcatagctatcaacttactctgcatcagagatttcatactggtgagaaaccctatgaatgtcaagaatgtgggaagacctttactctttacccacaacttaatcgacatcagaaaattcacactggtaaaaaaccctatatgtgtaagaaatgtgataagggtttttttagtagattagaacttactcaacataaaagaattcatactggtaagaaatcttatgaatgtaaagaatgtggaaaagtttttcaacttattttctactttaaagaacatgagagaattcatacaggtaagaaaccctatgaatgtaaggagtgtgggaaagcttttagtgtatgcggacaacttacccgtcatcagaaaattcatactggtgtaaaaccctacgaatgtaaggaatgtggaaagacctttagacttagtttttaccttactgaacacagaagaactcatgcaggtaagaaaccttatgaatgtaaggagtgtgggaaatcatttaatgtgcgtggacagcttaatcggcataaaacaatccatactggtataaaaccttttgcatgtaaggtgtgtgagaaggcttttagttatagtggtgacctcagagtacattctagaattcatactggagagaaaccatatgaatgtaaggaatgcgggaaagcctttatgcttcgttcagtccttactgaacatcagagacttcatactggtgtgaagccctacgaatgtaaggaatgtgggaagacctttcgagttcgttctcaaattagtctacataagaaaattcatactgatgtgaagccctacaaatgtgtacgatgtgggaagacctttagatttggtttctaccttactgaacaccagagaattcacactggtgaaaagccctataaatgtaaagaatgtggaaaggcctttattcgtagagggaatcttaaagaacatctgaaaattcattctggtttaaaaccctatgactgtaaagaatgtgggaagtcctttagtcggcgtgggcagttcactgaacatcagaaaattcatacgggtgtaaaaccatacaaatgtaaagaatgtgggaaggcctttagtcgtagtgtagaccttagaatacatcaaagaattcatactggtgagaaaccctatgagtgtaaacaatgtgggaaggcctttagacttaattcacaccttactgaacatcagagaattcacactggtgagaaaccctatgagtgtaaggtatgtagaaaggcctttagacaatattcacatctttatcaacatcagaaaactcataatgtaatttaatataagaaaaggtttccatgtcatgctctatttatagaatatcaaaatatttatggccagaagttctgtcaatgtgttgatgtttttttacacatattaacttaataaatgtatgagtcttaaatacctcttagttctcattaaatttaggaaaattcacactagaaaataaagctgttaatgtaacagttgtggaaaagtgttctagcaacagcatatacttatcatcattgcctttccactactctactatctgtgtgatattagacaaaatatttgcttcttggtacctcagctgtaaaatgaaacacacctaaaagtgtggttgtttccaacatgtataatacagcaacaactatctggcccaaactgctttggattaatattggatattactgtttttattatcatcaacattattattagtggatttcttaataggaagatgcaatggagatgacaaatttggaaaaaccactcatcacttacatttcatgaagtacttctttgataaaatctgttatgggctgaatgtttgtgttcccgtaacaattcctatgttgaaacacgaatcccaaggtgatggtatttgaaggtagggcctttaggaggaaattaggtcatgagggtggagccttcatgagtggaattactgcctttataagaagaagccaaagagccagctagctctttcaaccacatgaggttacagcaagaagtcagcagtctacagtgcaaaagagggccttcaccagaacccaagcatgctggcaccttgaccttggactttcagcctccaaaactgtgagaaataaacctcagttgtttataagccactgagtctacgatattttgttatgcagcccagataactaaggcactccattagaatataaataaaatgtaaagatctaaattcagacctcattgcttaagttctaaaattaaagatgaagagaaaccctaaggatgtagtgagtgggaggaccttagaatgtagctgttgaagcatcaaagagaggtgtgagggaatttacccataataatacagaaattaaatggatagaaaaaagaaagatctggccatggtggctcacgcctgtaatcccagcactttaggaggctgagatgggtggatcatctgaggtcaggagtttgagaccagcctggccaacatggagaaaccccgtctctactaaaaatacaaaaattagctgggtgtggtggcaggcacctgtagtctcagctactcgggaggctgaggcaagagctgaggcaagagaatcgcgtgaatccaggaggtggaggttgcagtgagctgagattgcaccattgcactccagcatgggagacaagagcaagactttgtctcaaaaaaagaaaaaagctgtctatttagaaagtttttactaattttattatgaaaatgctctgagacacagaaacatagaatgcattctataatgaacacccatttttaccttccacctagatttgaaaatgtatattttgctttttctataaaatacatttttttgcgataccatttgagagttaagttataaacatcatatcattttgcccctaaatcagtttgtatctcctaaaagtaatggtaatacatatacccaaagtactaaaatcacaccctaaaaattaacaattccatagaatcttataatatccattccatgttgaaatttccataattgttccaagaatatatttcatagatatttaacaaggatttactctccagatcatacattgtaacattttggtggttctgtcactttttttttttgagacggactctcgctatgtcgcccaggctggagtgcagtggcgtgatctcggcttactgcaacctccgcctcctgggttcaagcaattctcctgcctcagcctcccgagtagctgggattacaggcgcctgccaccacgcccggctaatttttgtatttttagtagagatggggtttcaccatgttggccaggatggtctcgatctcttgaccttgtgatccacccaccttggcctcccaaagtgctgggattactggggtgagccactgcacccggcctgctctgtcacttttaaactgaacagcccctcatctttatgtcattttattggcttttagaagagtccatcacagttgtcgtagaatatcctggattctgggtttgtcgtattttatttctgcataatgttgttcctctttttcctctgtctccaaactgaaacttaaacagcagcttgatttgcttctggtcaaacatttttagcaagaatacttcataggtataatacagtctgtacacacaggaggcatataatggcaggttgtccttttattagtgatgctacatttggttaaggtagtgactgccagatctctccattgtaaaggtatgttattttctttgcaattagtaagtaatttggtgataatttgcacctcctcttacaaatttacaatcatctacatgtataatacaagtcatggattaaactggaaatcaaaagttaaatattgatttaacagaaagcagtgatattgaaatgcctacatattgaaatctgtaggatgtggccaagactctactcagtggtaaattaacatcccttaatgcatacagaaaaccacgatttggggatagaacattttgttctctgtatcctcaacacgactgtgacgccttttgcatagtaggcacttgataaaactcgggaaaaaataagtatttaactcaagaaacaaaaaaaggtaccaaataaagcagatgctaaaagaaggaactagttaatgcaattaaaattagaaattaagtaataagcagattatagacttattcaatttttccaaatccagtaaaaagaaaaaaacgatgacacagttataagtgtcacgaatttaaaaaggacattaccagagatatcgatgtcatcccagctactcgggaggctgaggcaggagaattgcttgaacccaggaggcggaggttgcagtgagccgagatcacgccactgcactccagcctgggcgacatagcgagagtccgtctcaaaaaaaaaagtgacagaaccaccaaaatgttacaatgtatgatcctgagagtaaatccttgttaaatatctatgaaatatattcctggaacaattatggaaatttcaacatggaatggatattataagattctatggaattgttaatttttagggtgtgattttagtactttgggtatatgtattaccattacttttaggatgtcaaattataagaaagtagtatcatttcaatgtatataaaattccagagctaatgaagtcttttctagaaaatgtacttcattgaaatttacacaacataatcatgcttgagtgaactagtaaatggaaaacgtaaattcagcttaagctatagaacaagctagaacaacacagtctgctagcacaatctgttttagtttaataaaaacttcaaggataattgttaccagaattttcccagctcatgatacatggctgacataatccaaatgataaaactagagagaatagttactaaaaaccaaaatttaaatgagtcctaattaaagagaaaaatcaaaatgctaaataaaatgtcagcaaaatgatacaatttttcagtaaatatatctgaaatgtgcaggcactggaatattctggttctatacatatgcagcttaaattatggaaaaagaattgctacagtcctattatcatctagattcattatcatatatatatatatacacatatatatatattagccttactatcactgatacctcctgatttcatcaatgctaaaaagccccacccaaatctcatctcaaattataattcccacatgttgggggagggaccctgtgggaggtgactggatcatgggggtggttccaccatgctgttctcatgatagtatgttctcatgagatctgatggtttaaaagtgtttggcagttctccacccccctctctctctcctaccaccatgtaagacatgccttgcttccccttcaccatgtgctatgactataagtttcctgaggcctccccagcaatgtggaactgtgagtcaattaaacctctttcctttataattactcaatctcaagtagctctttatagcagtgtgaaaatggactaatacaatgtcttgtgaaaacgttcattgatatttttagtaagataagccttgtgccagtatcaaagcattttatatttgatgggatatggtgtatgtatatatacacatgcacatacacaaaccagacacaaagacttatttgaatttaatgttcacaagaatttcctgaaaacaactgtcagggcaaaggcattttaataatgttttcatttaattttttttttttttttgagacagcattttgctctttcacccaggccagagtgcagtggtgcgatcttggctcactgcaacctctgccttctggtttcaagcgattctcctgcctcatcttcctgagtagctgggattacaggtgcctgccaccacacccggctaatttttgtatttttagtagagacggggtttcaccatgttggccaggctggtctcgaactcctgaactcgtgatctacccgccttggcctcccaaagtgctgggattacaagtgtgagccactgcagccagccctaaatttttataaatggtattgggactattatatacacatgcatatacacacacacatataaacagctcccgaaaatataaacaacttttggtgaattaggaacaatggagaatacctgaaatagaggaagcactggtattagatcatctaagggaaccagaaaacaaaacacaagagtgtgcactactttgaaaggtgaatgtgacataataagggtggcctgggcctagggtttgtcacaagaagcaaaagtggggacagtgagattgtcctcacaaccaatagtgagattggttgcttggggaagtaaagtgatttaacctggcacatcaccttcccttaacccagttagcaagccctagtccctgcttccaggaggaggaggtgaggccactgactggtattgtcctaggggaaataggagcatccctatgcctggggctagcaggccaggcatgctgcagcacaaaaaacctgccactcctctgtctctaaaaacaagtcagagtgcacatcagagcagcacatcctattcctgcactgaagcagactacatccaaagtactctccactgtgaaactaaacacatatcagaattaccaaacatttccaaaaaagctgactcccatataatagagaaacaatgctgatccaatgggaaatactataaaggcagtagtagaataaatgaaacgggagttttgtttaagtacgaatattaagagtaagtaggaatagcatcctcaaaatgatatgatgggaaatagcaaatctctataacaaaatcaactagagattacaaaaattacttaaatgtccttgtggaaataaaatctttaatagagggacttccatttctgggaaaatggaagagatgtccttttccctgttcctcccactaagtacaactgaaaactctgaacgttatatataaaacaaacacaagatgactctgaaaggtggagagaagagagcagactggctagggaccacaggacccaagaaatgacatagtcgtgaagttccatggactttatttatatcccagacttggagctaaagaagctggcaaccctaaaatgccaatattcagagatggaaaaaaaaattctaaagaaaagcctactctgtatagctaaagaaacaggaaagggagtctagcaagacaggacactattattttattttattttatttattttttgagatgagtctccctctgttgcccaggctggagtgcagtcatgtaatcttggctcactgcaacctctgtctcctgaactcaagcaattctcctgcctcagcctaccgaatagctgggattacaggcgtgcaccaccatgcccggctaatttttgtatttttagcagagatgaggttttgccatgttggccaggctggtcttcaactcctggcctccattgatctgcccaccttggcctcccaaagtgctgaaattacaggaatgagccaccacgtccagccaagacaggaaacttttaaataaccccttacttcagccaaatgccacagaaaaatctgtggccccaccaccactcttaacaccaaaggccaagtggagagtctagacttttacctttataggctgtaacaaggtgtccaaacttcctgaccaagtagtctcagaaaaagcccagtgtgaaaccagggtctttcattttcatcaggcaataatgagcccctcctgtatggtgtcaatgccaactaaatggagaacgtggactttcatacctaatgaaaatattgttcaggaaagaaggagaaatcaagaacattctcaggtgaaacaaagctaggagaatttgttgccagcagacctaccataaaggaaaggctagctgggcgtgggttggctcatgcctgtaatcctagcactttggcaggctgaggcaggccaatcacttgtggtcaggggttcgagaccagcctggccaacatggcgaaatccccgtctctactaaaaatacaaaaattagctgggcatggtggtacacacctgtagtctcagctactcaggaggcggaggcaggagaatcgcttgaaccccagaggcagaggttgcactgagccgagatcgtgccactgcactccagcctgggtgatagacagagactctgtattaaaaaaaaaaaaaaagaagaagaagaagaagaaaaagaaaaaagaaaggctaaagaaaatctgagaacagaaattaaatattaaacaaggaatcttggaaaattaggaaggtagaagaaacacagcaaaattacgggtaatttccttatcttgagtttcctcaattatgtttgacaactgaagcaaaaattgtatcactcttaggtggtttccaatgtatataaaagaaatatttaacttgattataatttgggatgggtaagggaagggaaggtttctacacctaattcaaactggaaaaatgtcaaaccagtagactttgtaagttatgtatatataacgtaatgcctagcaaaagtgtgcaatcttttggcatccctgggccacattggaagaactgtcttgggccacacataaaatacactaacaataacgatagctgatgagctaaaaaaaaaaaaatcataaaacaatctcataatgttttaagaaagttcacaaatttgtcttgggccgcattcaaagccttgctgggctgcatgaggcccacaggccgcaagtcagataaacttggctacagctactgctaaaaaaattgatacaagtgatccacccaaaaacactataaataagaaaatggcagaggaggaaaccaacaactcatcccttcacaaaagcaatgaataaacaaataaaaacttacagaatcaactcttgaaaaatttagaaaccagagtaatctacttttttttttgtttgttttttgagacagagtcttgctctgtttcccaggctggagtgcggtggtgcaatcttggctcactgaaacctccacctcccgggttcaagtgattctcctgcctcagcctcccgagtagctgggactccaggcctgtgccaccacacccagcccagtcagggtttcaccatgttggccaggctggtctcgaacttgtgacctcaggtgatccacctgcctcggcttcccaaagtgctgggattacaggcatgagccaccacacccagcccagattaatctttttttttttttttttttttttttttttttttttttctgagacagagcaagactctgtctcccaggctggagtgtactcactgcaacctctgcctcccggattcaagcgattctcccgcctcagcctcctgagtagctgggattactggaacccgtcaccaagcctggctaatttttgtattttttgtagagacagggtttcgctacgttggccaggctggtctcaaactcctgacctcaggtgatcctccagccttggcctcccaaagtgctgggattccaggcgtgagccaccacgcccagccagagtaatctatttttgaagggcttcaaggtggctgactagatccatctagtactagcctcttccacagaaaggaaccaaattagcatatagataatcacactttgaatagatcatctgagggagaacactggaatgccacagagaagtgatgggaaaagttgaaagaaggagaggcagcctgcttggccaggagagtctgggagcctggagaggctccctaatgcagggaaacggttaagtgagagacccccagtggtccacattcccatcaatggctaatcttcgccaagggagaccccctctaccctcatgagccctgagactaacacaggtagctgcctgaagactgcacaagggcattgctccagagagggagtgcattttgggtcccacaaacccttgagtcctaagcagctgctgcatggcaccattttgatagcccaatccccaccagaatgcatcctgccctggggcccaacaggccctgcatctccacatccctggaaccccatcacatttgccacccatagctatcccagcagggatgaggcaggagccactggcagtgaccccacttcccacaagcagagtggtggctgcacattttcaggagcactaaggacaaatccactgcctgcattggccaccactgtaggcttctgcaggaccaagaggtgagcaaaacacatttcccccagctccctatggctgctaccatttgaaagcaactgtgatgtccccaatagcatggttgtagcacagctgctactccccctgcccctccgtgctttccattggtggcctggggataaccccatccctgcctaccacagtcagcacctgcaagcaccaccagatggctcaaggacagtccctggcctgagagtgccatccaggggtctggggatcgcccagcccagtccacaaccgttggcacctgagcactcctcccagggtctgaggtcaggcctacacaacctgccactaccaccacagctggcagccacctgcacacaccacctgcagacctggggacttgtctgcccagcccattgtagccactgccaacaccagcatggactgcataggttccagaaggttgtcccaccactgctactggcataggccacacaattcagctgcacagggggttagggacccacctaaccacccagcccattgctgccactcctggcactcaagcaagccacctgaaggcccaagaattggccacagtggctcatgcctgtaatcccaacactttggaagaccaaggttgttgtgggaagtcagggaccccaaacggagggaccggctgaagccatggcagaagaacgtggattgtgaagatttcatggacatttattagttccccaaattaatacttttataatttcttatgcctgtctttactgcagtctctaaacataaattgtaaagatttcatggacacttatcacttccccagtcaatacccttgtgatttcctatgcctgtctttactttaatctcttaatcctgtcagctgaggaggatgtatatcgcctcagaaccctgtaataattgcattaactgcacaaattgtacagcatgtgtgtttgagcaatatgaaatgtgggcaccttgaaaaaacaataggataacagcaattgttcagggaataagagggataaccttaaactgtgaccaccagtgagccgggcaaaacagagccatatttctcttctttcaaaagcaaatgggagaaatatcgctgaattatttttctcagcatggaacatccctgagaaagagaatgcacacctgggggtgggtctctgacctggccccccgggcgtggtcatctcttatggttgagactgcagaggtgaaatagactccagtctcccatagtgctcccaggcttataaggaagaggaaattcccacctaataatttctggtcagaccagctgatctcaaaaccctgtctcctgataagatgttatcaatgacagtggtgcctgaaacttcattagcaattttaatttcacctcggtcctgtggtcctgtgatcttgccctgcctccacttgccttgtgatattctattaccttgtaaagtacttgatgtctgtgacccacacctgttcgcacactccctccccttttgaaactccctaataaaaacttgctgggttttgtggcttgtggggcatcatggaacctaccgacatgtgatgtctcccccggatgcccagctttaaaatttctctcttttgtactttgtccctttatttctcaagctggctgatacttaaggaaaatagaaaagaacctacgtgaatatcggggcaggttccctgatagaggtgagaggagcacttgagcccgggagttcaagaccagcataggcaacatggcaagaccccatctgtacaaaaataatttttaattagctgggtgtgatggctcacgcctgtagtgatggctattcaggaggctgaggtgagaggactatttgagcctgggaggttgaggctgcagtgagccatgattgcaccactataccccagcttgagtcagagtgagatcttgtctgaataaaaaaagaaccaatctgcctggacccctctaacaccagtgccagcatatgctaccgtgggaccaaaagacaggcatgctcagcccactgctgccaacaatggggcctggagactggtccatgtggctggcaacccagtcccaagtaaaacttcaccacagcctacactgacaacagcaccctgagccactgaggaaatcacagaaaccactgacaccgtttgcagttgaagcaatcatacagagactacactacttcatgcacctagaatcaaagacaaggtgcctatccaaccaacaccacagatacatcttcaagaaaaattcctcccctatgaaagcaaattcaaaacattggaagaagcaactattacaccagatgtgaagatctcaatgtaagaacacaagaaacatgaaaaagcaaggaaatatgacataaccaaaggaacacattaattctccagcaaagatcccaatcaaaaagaaatttataaaatctgaaaaaataattcaaaatatttatcttacttttatttatttattttgagatagggtctcattctgtcacccaggctggaatgcagtggtgtgatcatggctcagtgcagcttcgacctcccagccttgagtgatcctcccaccccagcctcaagcggtcctcccacctcagcctccagaagggctgcgactataggcacacatcaccatattccactttttttttttttttttaattagagatgaggttctccttatgttccccaggctggtcttgaattcctgggctcaagtgattctctcccgtcagcctcccaaagtgctgagattaccggtgtgagccactctacccaaccaaaaatactgattttaaagaagctcagtgagacacaagataataatgaaaaacaaaacaaaggaatcagaaaaaaaccaattcaggatattaatgagacattttcaaacagatatcatttaaaaaaacaaattctggagctgaagaattcactgaataaaatataaaatacattcaaaagcttcaacaatacactacatcaagcagaagaaagaatctcagaacttgaagacaagtcttttgaaataaccctgtcagacaaaaaaaaaaaaaaaaaaagaatttttgaaaatgaagaaaacctacatgacatattgggacaccaatataggagaacaaatattagaattttagatgttccaggaggtgaagagaaaacaaaagggctggaaaacctatttaatgaaataatagatgaaaacatcccaagtctagcaagagagatttgaacttgcagattcaggaggctcagagatctccaaatagacccaattttaaaagatcttggccaaggacagcagctcacacctgtactcccagcactttgaaaggccaagacgggagttgttcaagaccagcctgggcaacatagcaagactccatctctacaaaaaataaaataattagctggatgtggtggcacatgtgtgtagtcctggctatgcagcaggctgagacggaaggactgcttgagctaccattagagctcaaggctgcagtgagctaggatcatgccactgaattccagcctgcgccacagactgaggccctgtctctaaaaaaaaaaaaaaattaaaaattaaaataaattaatttcaaatataatgatattgataagttaaaagagaataggaaaaaagatacaccatgtaaatactaaccaaaagaaagctgagtggcattactaatatcagaaaatgccagtttcagagaaaatcagagcagagattatgaaattatacaaaattatttaaaaaagacctggtgcagtggctcacgcctgtaatcctagcactttgggagactgaggtgggcggatcacttgaggtcaggagtttgagaccagcctggccaacatggcaaaaccttgtctctactaaaaatacaaaaattagccaggcgtggtagcatacgcccataatcccagctactcgggaggctgaggcaggagattgcttgaacacagggtgcagaggttgcagtgagccctcaaaaaaaataacgaaaattataaaaagatcagttcaccaagaaaacataataatcctaaatgctatgcctcatatatcagagtttcaaaatacataaacaaaaagctatcagaactcattatagttgagaacttttatacatctctctcagcaattgggagcgttctcaaagttataaagggcctgagttgggggaaaaacacatctatagtgcagtcatgaaaatgtagcctcagggaaaagatgaagccaatgtttattctttctgtgaaacagcagggcctctaagaatctgtcatttttgggccaggcatggtggctcacgcctgtaatcccagcactttgggaggctgaggcgggcggatcacgaggtcaggagatcgagaccatcctggccaacatggtgaaaccccgtctctattaaaaatacaaaaaaattagctgggcgtggtggcgggcacctgtagtcccagctactcaggaggctgagacaggagaatggtgtgaacctgggaggcggagcttgcagtgagccgagattgcaccactgcactccagcctgggcaacagagagagactctgtctcaaaaaaaaaaaaaaaaaagtatctgtcatttttccacagtggcctcttagggagcacaataaagagaagagcctgtggtgtgtcttttgtttcatttaatgaaccctaataaaattcacagtatacacagaattttcaagagaattgtactacttgatgcactacaagcttgagcttacaggggcagaaacggtacaaagtgagaaaggatctttgggttcccaaatatctacaagaaaaaagtatgagaatagtactcagttgtaaacatgggctactttttatgaagaaaaaaaagaaaaccccagcgtgactcagaaagtgcaaccaaaagatcagatggcaggacaagagccatagaaaatcatttccagggaacgctgatcaaggagctggttatgtgtgcccagccagatttcagaattgttacgattagcaatttccttcaactgttttacccaccaactttctgaatctgaatgcttattattctatggctgttccaccactggatgtgggtgtgtcaagaaactgtagattgaagttagttcccaatattgtggactgagagggctcatactcaaggagtgtatcccaggaactgcactgaaggaggcttatccacacctggacttgattttttttctttccaaatttaattttaggtgcagggggtacatgtgcaggtgtgttacatgggtaaattgtgtgttgtaggggtttggtgcagattattcatcacccaggtaataagggtactacccaagaggtagttttttgattctcatcctcccaccctctgtcttcaagtagtccctggtatctattgttccctgccttgtgtccatgtgtactctgtgtttagctcccacttataagtgagaacatgctggttttggttttctgttcctgtgttaacttgcttagaataatggcctccagctccatccttgttgctgcaaaggatatgattttgttcttttttatagctgtgtagtattccatggtgtatgtatgtatgtatgtatgtatgtatgtgtgtgtgtgtatatatatatatggtgtatgtgtatatatatatggtgtatgtgtgtgtatatatatatacacacacacacacacacacattttctttatctagctgggtttgatttagataaggtcctagacttcaaattgatactgtaataggatgagactttggaagcctgagggaagtgcatgagtgtattttcatggggcaggatgtgaatggtggccaggaggcaaaatgtggcagactgtatttttcaaagatggatacaataatatttcccatcccacatggtcttctacagtatgttcttagcacttttccatcaagaggtaaactcaaattccccttcctttgaatttgggctggatttaagtctcactagtaaccattaaaatgcagaagtgatgctgtaatacttccaaagctaggtcagaaaaggccagcttccacctggttctcttagaatgttcactcttgggatgttcatcttggaataaacattctgtgaaaaatctgtgaccatgtaggtgttcctgctgccagttctagctaagattggtattcaagtcctccaagtccaaaattcaagcatgagagagaagaagcctggaagtggatattctagccctacctggactagtcattcaaataaccccagctgagactccagacatcatgaagcaaagaaaaaacatccctgctgtattctctctggatttttgacccacagaacctatgagcataacatgcttgtcttatggcacgaagttttgggtggcttgttacgcagcaatcatcagagcacttaaacccttctcaaaaagaaccactggaaagttataccaaagagtaataaaatggttttttttaagagggaattgatggaacagattgtatggaacacaaactgatgcaaaatttctctgaacacattttatgtttttaactttaaaatcatgaaaatgttatagtctttaaaagtaaaattgaatcagaaataaaaatggcagtccttgaacactgaaaataaatagaaacgaatgaatctagctggaaatcaggttggttagaactaagcattttccctctacattcgtagtgaatgatatttgaaggacggagagtgatgccaagaaatcttcaacttcattcagcattcatgtttggtagtaatgctcgtattctgttgtaagtattttatactgtttatagatcacagcacatacattagttcattgttaaaatccaacaagatgttcaggggaaaagcaaaagacgcgagaataaaattaaagttaaaaataatgtggtattaaatttgaattggaagtatcaatataaactcagtttttattctcctaagttaaaaaaacttttaattgaactataataaacgtaaagtatacaaatgtacaactcaatgaattttcacaaactgaatacatcagagtaatcagcacgcaaatcaagcaacaaaacattactagcatctacagaaacctcccattgctcttaccatcactatccctcctgccatgtacccctacccccctcacccccaccagtatcttttttttttttttagagacggagtctctctctgttgcccaggttggagtgcagtggcgcgatctcggctcactgcaagctccgcctcctgggttcacgccattctcctgcctcagccacctgagtagcggggactacaggcgcccgccaccatgccccgctaattttgtttttgtatttttagtagagacagggtttcaccgtgttagcccggatggtctcgatctcctgacatcatgatccgcccgcctcagcctcccaaagtgctgggattacaggcgcccgccaccacgcccggctaattttttgtattttcagtatttttttttttttttttgagacggagtctcgctctgtcgcccaggctggagtgcagtggcgcaatctcagctcaccgcaagctccacctcccgggttcacgccattctcctgcctcagcctccccagcagctgggcctacaggcgcccgccaccacgcccagctaatttttttgtatttttagtagagacgggttttcatcgatctcctaacctcgtgatccgcccgcctcggcctcccaaagtgctgggattacaggcgtgagccacggtgcctggccgtatcctgacttctaactacattaaaaagttctcaatttttgtattccatataatcatatagtatgtcctcttttgaaggggtgggttgcccctccacacctgtgggtgtttctcgtaaggtggaacgagagacttaggaaagaaaaagacacaaagtatagagaaagaaataaggggacccggggaaccagcgttcagcatatggaggatctcgccagcctctgagttcccttagtatttattcatcattcgtgggtgtttctccgagagggggatatgtcagggtcacaagacaattgtggggagagggtcagcagacaaacacgtgaacaaaggtctttgcatcatagacaatgtaaaggattaagtgctgtgcttttagatatgcatacacataaacatctcaatgctttacaaagcagtattgctgcccgcaggtcctacctccagccctaaggcggtttttccctatctcagtagatggaacgtacaatcgggttttataccaagacattccattgcccagggacgggcaggagacagatgccttcctcttgtctcaactgcaagaggcattccttcctcttttactaatcctcctcagcacagaccctttacgggtgtcgggctgggggacggtcaggtctttcccttcccacgaggccatatttcagactatcacatggggagaaaccttggacaatacctggctttcctaggcagaggtccctgcggccttccgcagtgtttgtgtccctgggtacttgagattagggagtggtgatgactctcaaggagcatgctgccttcaagcagctgtttaacaaagcacatcttgcaccgcccttaatccatttaactctgagttgacacagcacatgtttcagagagcacggggttgggggtaaggttatagattaacagaatctcaaggcagaagaatttttcttagtacagaacaaaatggagtctcctatgtctacttctttctacacagacacagtaacaatctgatctctcttgcttttccccacactcttttatgtctggcttcttttgcccagcattatgcttttgagatttatctgtattgtacacagtcataggttgttcattttcattgcagtatagtgttgattcagaaattttatttctgcagaaaagcaacagttcaatattcagaaagaacaggtgactttagaacatgatgccacatccagggaaacatacctcacatccaccttccaacacaactaaccacctgacatgaggtccgaactttccacctttgctgtcacctgttttggttacagcacttatctgttaaaatgggttcatatcccatactcacaagcattaagagtgaaagttacagggtaaaaggtgcttcagatacattaagttaaataaaatcaattaaactctcattacttcattatttggagaagctatagttttattttcttaattattaattttaatatgctcatttaaccacagaatgctttctaaaaataccatcaagcactagtgtttcctgggaaatggtttcaaatgctatcaagtttcatattccatttgagaaatggaatataatgatgtaatacactgaacatcatggcttcccaattataacagcaaatacagttcataatggatgaccacggtgaaatcaccgaagtccaactgatgcaatcatttataagaactctgtctttattaattttgagaaggtaattttaaggtgttgggttacacttttacatacataaaattcattccattcttaatacatagaaagctaaaaaaaaaaaaaaaaaaaagacaataagcatgaattgagatgatactgggccagaatcgtatctcttttactatcattatgatgttctgaaggtagaatgcctagaatctaaatatataattaaagctggatggatctggtccaagttattccacataaatgattttctattctaaactgttggatataatttcccatagaaattagaattaccagatttctcttcatacggaaaatgtctagattttcgttttgccagccctcctcacctagttcttataatcagttttaggttagtcttgtagaatagtatgttggaaaaatttagcaattaccaattcttcaaagattttacttgtaaaaaattaggttctcggagtctctctgagaccactctggctcaggagagtaggattttttttttttaaagttagattctaaatgtattcttttagaaagcgtatcttctaaccgtcttaatttttcatttgtttgttggtctactcaggctctcttcattcagcatgtgaagtcaattttagtaatttttaccataaaataattctggattttcaatattttaaaatacatgtatagtgtgtgtataaatataaatatatatacctacacactatacacacacacattacatatatgtagtatagcaacttataactttaaaaatccatagctgtcacttttatcattcatatagctgtagctgtgtaatctttcatatttctgtgatcaaaactgcaaaggtcttgactatattggtatcttttaaagaaacacacacaaaaaaaccaagtctactttttattgtttatgccagcgctgacaatagaaatacgtgagctacatatataaattttcctataacaattttaaaaacaaaaaagtgttattcattttaatgtattttatttgaaccaatatatctaaaatattatttcaatatgtactcaatatgaaaaattgagatacttaacttttttaaaataactaagtcttcagaatcttgtgttttacaaaaaaacaccatttgaatttggactagccacatttcagtgctcaataactcaatttcaagtgctcaacaggttgctagtgactaccatatattagtacaggtctagtccattatttcccacatttagcagtagtaattgctttcttttactcattctttaaacatatgaagtgagagtcgggcatggtggctcacgcctgtaatcccagcaccttgggaggccaaggcaggtggatcacctgaggtcaggagttgagaccagcttggccaacatggtgaaaccccatctctactaaaaatacaaaaatcaacctggtgtggtggcgggcgcctgtaatcccagccactcggaagtctgagggaggagaatggcttgaacccgggaggcagagcttgcagtgagccgagactgtgccactgcacgccagcctgggcgaaagagcgagactccgtctcaaaaaaaaaaaaaaaaaaggtgcataccatgggtactataatatagagatagagaggtcaactaaataaaatgtggacctacattttaacttcctgaatacattatcgtcattatagtgtaattaatattccaatcccaatgtgtagagctttggcaacatccacaagttttaatatgtagaaattttctttttttctttgagatagagttttgctcttgttgcccaggctggagtgcaatggcgtgatctcggctcactgcaacctctgcctcctgggttcaagtgattctcctgtctcagctgcccgagtagctgggattacaggcgcatgtgaccacgcctggctaatttttgtatttttagtggagatgaggtttcaccatgatggtcaggctggtctcgaactcctgacctcatgatctgcccaccggcctcccaaagtgctgggattacaggcatgagccaccgggcccagccagaaattttttttaaaataattcattttaaactggctataatttcatggataatttgatctttaaaagaacatcatggaaaattttaaatacacaaaagtagaatagcaaaaacaaaacaaataaaaaccatgtatccaagacttaggttaccatcattttgccaaacttgttattcatcctcatttttcttttgtatgaacaaaaggacattccagatatatcatctcctgtgtatagacttcagaaattatctctaacaaatacacttttacataaccacaatgctattatcacacataacaaagtttcttaatattatctaatattgtcaatattccattctcccaattattgttaagtatctcttcttttacatgtttgttcaactcatgatctaagtaaaaaccactgtttcattgcatttgactgatgtctcaagtctgtcaatacctaggagttccaccttatttcttaaaatgccattttattggttgggaaaccaggtgattcctcttgtagaattacccttattttagatttaattgctcctttttgtgtcatgtaatttactcttccattccttgaattttctctaaactgggagttggctcttgaggcttaaattcaggttcaatatttttggcaagatgtgtatatcttactgtagcacattaggaggcacgtaatttttactctcttgctttttgtgaagttgagatgatgagtgggttcagacgttgtcagtctcatctattcactataaagttcacaaccttcactgaatggtgtcaacctgtacagagaatcatgcctagatccattatttcattatgtgttacacaatagtttttctaatataattttctattattctttctgcattcattagcctggaattttctaataaagaagaactttacctccttaacttctggttgccctgaaatacagttcctacaggaaatgcagactaaatgactttcctttcatttacacattttcagaatgaagtggttccctagcaaccttcgtgtgtatatacacagatggaagaatatggagataataataggtaagatcaaaagcttttccacattcagtcctgtaataaagttcttttctaggatgaatttcctaaagtttaacatggtttcaaaggtgatgaaaggcttctatatgttcattaacatattctttcctttaaataaaacttcctatgcttagttgtgagcatgaagcaaaagggattcccacgttcaaaaacctttcctctagaatgtacttcctatgctcaacataaaattcgcaaaggaagagttctaataattattaagttacattatgaattcgctgatggtaagtaagatgtgaatgttgtctaaatgcctttttacattccttacatttgtatggtttctcaccagaatgaattctctgatgttgaatcagtgatgaatgaagtctaaaggcctttccacattccttacagtcatagggcttttcaccagtatgaatactttgatgttgggtaagttgtgaaagcagtctaaaagtcttctcacattccttacacttaaagggtttctcaccaaaatgaatactctgatgttgagtaagctgtgagaacagcctaaatgccttcccacattccttacattcataaggtttctctccaatgtgaataccctgatgtgaaataagttctgagtaacgacgaaagaacttctgacattccttacattcatagggcttttcaccagtatgtattctctgatggagagttagatgatagccacgactgaaagtcttcccacattccttacaatcataaggcttctcaccagtgtgaattctctgatggagagtaagttgctgccgcactctaaaggcctttccacactccttacattcatagggtttttctccagtatgaagtttgtgatgtagtcgaaggcctgtactacacagaaaggcctgaccacattccttacactcatagcacttctcagcaatgttcagtctctgatgtcgagtaaggtgtgcatactgcctaaaggccttcccacattctttacattcatagggtttctcacccgtgtgaatcctttgatggagattaagttgtcctctaactctaaaggctttcccacattctttacattcatacggcttctcaccaatatgaattctctgatgtactcgaaggtctgagccacatgtgaagatctttccacattttttacattcatagagtttgtcagaagtatgaattctctgatgtcgactgaggtgggcacactgtctaaaggcttttccacattctttacattcatagggtttctcaccagtatgaattctttgatggaaagtaagttgttgtcgtactctaaaagccttcccacattccccacattcgtagggtttctctctgttatgacttttctgatacagaggaagagatgtgagttttctgtaagtaggcattttttcagaggtggtttttgtcacttgcctgaaacacacctcatgaggactttcttgttcttcaagtccacagcttttaattctttccattaccttccactgagataagttcatttcataaatatcctttccttgaaataactttttagtgtcatatctggattccaaatctgaaagaaaacaagaccaaaacatattttcctgttctacacaaaataaacaaacgaaaactttataatagaaatcggtgaccaaaaaaaaaaaaaaagaaaaagaaagcccaattgaagtaaatgggctcaaaatctctaaaataggtaatttaaaagaagctaaaaggaaataagaaaatgatgagttaagaccaggttatttgggtgcagatcaaagtttgagactccccacttaaatttttcaatttctcttttcagttagaatacagagcaaatactttatcaggagtaacatggactctgtcgaacacaaggtatcaactcaagccactgtcccctttgctgtccatgtccctatgacacttgcctgcctcctttctgctcctagaatgtgtcacaatctttcttttcttttttttttttcgagacggagtctctgtcgcccaggttgtagtgcagtggctcgatctcagctcactgtaacctctgcctcccaggttcaagcaattctcctgcctcagcctccctagtagctggaattacaggagtgcgccaccatacttggctaacttttgtatttttagtagagacagggtttcaccatgttggccaggctggtctcgaactcctgacctcaagtgatccgcctgcctcggcctcccaaagtgctgggattacaggcgtgagccaccacatccgacccaatctttccactttttggagcttttcactggctattaaatctcccaggaatcctgacttgggtttgcatggttgggtttctttcatccatcaggtttcattttaaaaatcagaaaaatgatccctgctgacttcatgtaatatatatcctttgttttctatcccagtcacttctttcttttttctttttttctttttttttttttttttaaagacagagtttcgctcttgttgcccaagctggagtggaatggcgcaatctcggcttactgcaacctctgccttctgggttcaagtgattctcctgcctgagcctcccaagtaggtaggattacaggcatgtgccaccgctgtatttttagtagagatggggtttcaccatcttggccaagctggtcttgaactcctgacctcgtgatccacctgcctcggcctcccaaagtgtcagaattacaggcgtcagccaccgcgcccagcctacttctttcctttttttttgagacagagtctcactgtgttgcccaagctgaagtgcagtggcatgatctcggttcactgcaatctctaccccagggttcaagcaattctcgtgtctcagcctcccaagtaactgggattacaagtgcccgccaccacacctggctaatttttgtatttttagtagagacagtttcacaatgttggccaggctgatctcgaactcctgtcctcaagtgatctgcccgcctcagcctcccaaagtgctgggattacaggtgtgagccaccatgcctggctacttatttcttgctgaacacttttctcaactgggttgttattcattaatttctccacttattattctctttattttcttaccttaaacttccccaagggcagaaacaatttttcactcaccagtgaatagcaaatccacagtacatattaactgtgaattaaattctcataattagtcaacaattatggcatatggtatcctgcctccaatcttaaaccttactacactgattaaacattctttttatcacttcctacagagatgggaaacaagtacatctaagctatctcagtaaaatatataaatggaaaatagtgatttctttacacttcatcatccttccaattgcctcttcatgtacacttgcagatacctccactgcagttcaattcctactttgcataatcataagtgaactttgccccctttcacgaccaaggtaataagagtctctaaatatttatctttacttgagtttacgtaacttgcacatctatgttacaggttccccgtatcttcctgaaagtccccataatgccatttgtgtacttcctagagaatatttcagtgattttccaggtgtaacaacaggtttatactatggtaaaaggctagtaaaattctgagcaaagagatgttttttgcaaatgcacctgttctcaaaatctttgcaataggaattcaatactcttcaaaaaggaaaaggtattttaaataatgttgctttagggttagggttagagttagggttaaagcaacgttatttgtaatatacccaaactggaaagagtccaagtgttcatcaatggaagaacagctaataaatgatggcatattaatacatcgcaatactatacaacaacaagaattaacaaactacaactacatgcagcaagggctaatctcaaaaacataatggtgaataaacaaaactagacatacaacaatctatactgtacaattccatttttataaagttaaaaaatgataattaataatctatggtggtgtcaggacagtggttagtcttggtggggaggaatgaccgaaagaagtcaagaggggcttctggtatcctagtaaagctctatttctgaatctgtgtactaattagatgggtgtggtcactgtgacaattcactaattatctgtatatttttgtatatatttatatttcaataagtttacttttaaaaagtatacgctaaaaagatagtaaaagacaacaataatttaaatgctgtggataaaatgtgaccagggacaggtaaatgaatggaacagaaaatactgctatataatcgtgtttctctctctctgtctctttctctgtctccccatccaaaaaaagcaatacaaaatatggcagttgtctagaattttggggataaagtccatttatggcctcaataagacaaataagatataagtgatattaataaaagcatcataattagctaaataatggtagtaaataagtaagtagttatgaaggtaatacaaaggttaagaaataagatgctcatttcaaaggatttacctgcaaattaaaaataaaaccagtaatctaaaaggaaagccagtcaaaaatcgaattaaaggctaaaacattcataagaaagtgagaacgtgttactgtttatagcattaaagtccacacaaactgggcaccatggctcgcacctgtaatccccaactacttggggaggctgtggtgggaggatcacttggggtggaaggattatttgaggccaggaagtcaagaccagcctggccaatgtaatgagaccccaatctcgaaaaactaaaattaaaagaaagaaatttaagcccatacaaattggcataagaaataataaacaatggaaaaggtaatggaataaaggaagtgagaagacaatggaaaagtaaatataagcataaacaaattaggacaaaatgtctgtattcactaataatcaaattagaataggttgtaaaatttatcctgtaaaatttgaaggttttcataaaaaaaaaaaaattgccagtgttgataaggtgaacttgagattgtcatatatggctccctacttaagtgacaagccagatcaagatcttggtattttgaacattctcagttagaaggctgttctataatatacacagctgagctgtacgctaccaaatagccatgtttgttcccaagtttgcctattacagttcttactgctgcaagcaactaaaattattaatgtttaaagacaattatttctatgaaaactaagttggatgtttcgtagtattggctatacataaacatttcatttttgtcaacgtaggcatgggtgagaaaatagtaaaagacagaaaacataaaaattcaagaattctgccctcagattgcttcacaagtatctttacattcctgttctacttcaaagaagttgaaatgggaaagaatagcctatgtttcataagtactttaatcaagacagaatgggctagacctacactgaaacaaaatgctgggccaaacatcaaaagattggactatgatagacaattttaatgttctacctccaaaaacatgtatgtaaaatatgtatatattttaattttaatattaacattatttaattatataatactatataatttaatattaactaataaaattaataagccaaatactagtttggattctactgaatcaaagagtttagtctagtaagcactgctaatgtgaaaacaaaatattagtccatcttagatcaaaatgaaagaagtgttatttccatttacagggcatcagctttaattaaaaataaaataggggcagggtgtggtggctcacacctgtaatacaagcactctggcaggccgaggcagacagattgcatgaacccaggagtctgaaaccagtctgggcaacatggagaaacctcgtctcaaaataaaataaaataaaataaaataaagtaaaataaaataataaaataaaataaaatagggagcaaattatcttgtcatccccggaggtatgctatttcctgaggtataatgtctcccccaccccttttttttctggctgatacaagattatacaggatacagaatatttatgaccaagacaattctaattatattaacatcagagatctgaaaatgttaaaaccctatgaccacaaaattgtacttctgaaaattaacactgatctaatactgcataatccatactgaattccaatgaaatactgaataatcctcaggttcagacgataatcttactgccatttcaccaaggaaccagaaacaactgaaagaaaaatatgtattctcttcaccacattctccaatcaatctatgtctgaattcttaccatatatgtggttttacttcatcaattggttccactccttcccatctactgaaggtcgctgcctacaaaactaccctctctctctacttcatcaatgttcctctctttgaaatcattctcgtagcctataaacatgttctaatatttcacatcgtaaaatatattccttgtactcttatgtatctgcttcccttctatggcaaaattcatccaaagaatagtttaaccttattttcatcattgcctcaccaccattttctttttatctctcagtaactctaaaacaaacaaatgaaaaacctttataacagagcatttctaacatatcaaaaagtagacagaacggcataataatatctccatgtatccagcattaaccccatgcccaatcttggcctacgcacctcccaatctacttccttcgtattatttgaagcaaatcttggatattacatcgtttcatgtgtacaaagtttgcatctcaaaaagcacttttacacataaccacaataccattatccaaacccaaaaaatgaattattaaatatcatcaaaagtcaatgtccacacttccatctgataaaattttaaacaacctaaaaagaataactcatccaaacagagttcacagaatacaactgttgacgtgtcttttacatctcttttaatctataggttttcctatcatttatttatttcccttgtaatttatttgttgaagaacctgtttttggtcctgtagtttcccatattctgaatttggctcactacattcccaaggtgtagaacatagtcctctgtcttcttcccgtaagttggcaattggctttagatgcttgataagacttaggaccttttgttggcaaagttacctcataggtgatatcgtgctctttcattaggagaaacaacacccgattgcctctatttctttgatgctatcagcactgatattcaatatctaaatccaatagttcttatgggttccacaatggtaatattctatcatttcttcttcatttattcactgaacacttttattaagagaaacatacctccatctactacctattcatataattcttataagaaaggcaggataaatgcttcttttccttttaatttatgctttttaaatgttagttttctagtaactttcaatgatgaataatttgctgttagtatcaagaatttataaaattaagtgtattttatgcattgcaatacactgcagtcattatatgtaatgacgttcaaatagtcccatctttggccaactggagcctgaccaacccatctaaaattactctattcattcattataattctccatatccttaccttactcacttttcttcataatacctaattacttcaggatattttagtaatccatttactgattttatttacttgtttactgtgtgactccccactacaatttaaactccatgaacatgggcaatgaaaaaatgtatacataaaagtcaaaatataaaagatgagctagaaagggattagattcaaaatacaggtaaaatggaatcactagggcagaaagctttcctctactgaaataggggaaagaaaagggagggaaacaagatagaaaagaaacgactgaggccaggcgcggtggctcacgcctgtaatcccagcactttgggaggccgaggcgggtggatcacgaggtcagatcaagaccatcctggctaacatggtgaaaccccgtctctactaaaaattcaaaaaaattagccaggcatggtggcaggtgcctgtggtcccagctactggggaggctgaggcaggagaatggcgtgaacccgggaggcggagcttgcagtgagcagagatcgcgccactgcactctagcctgggcgacagagcgagactccgtctcaaaaaaaaaaaaaaaaaaagaaaaaaaaagaaacgagtgataagtggaagtatggatgaaatgtctttgatggctcatgctgagaagatctaaattttcttcccaagtttcaggtctcttcttcacaattgacatctaaggggtgtgtctcctcctcaaccagcaggtctggccatgccataatggctgacctctgcctgatcagcacttacctagagtccatcttcttttctcatccctcacaaccatccagggctctttcccttgttccaatagggtgatcacatctggcttagaaatagaacatcctgcttaaaaataaataatagaatataataaagaatttatttaaggcttcaaaacaaagaagactatcaggattgaaaaacattcatagcatagagttacttcaggatcacaaggaaaaacaagaacacagaagtagggacctggttttattttaatttaaacttacacaggctctgtctcttgagagaaaagaatagttgaaagcactggtttcaaatcctgcctctctttcccatgtcagtagagcaactaattcaatctctctgcacctcatttttctcagacgtgaaaaagggataacagtaatgcgtatatatagcattgttgtgagattcgatttaatgtaagtgtttagatgagtacctggtacatgttaaccatcatatatgttcatgaggtactacatttgctattttttgattttttttttaaagaaaaataagtttcttgccaggatatgcatacaatattaaatgcaaattcatgtattttaaacttaatcacaaagcagttaaaatatgtctgttgtaggaaactgaatactgtccacttgagttttaacaaactgtcaattcaacccagcatcacatacactgtaaaagctcttttaatagctatgtagagccagacacctctgtcttcctattctcactgtaaatgagttacaaataacatggaccatccatagcagtatgaaatcagattgttttgacaatggttttgccatgagtgtctaagaatttatatccagctgtcattaaagaccggtaataacagaaaagtcgaagaaaaatataacggtcactgaattatacagaaagatgaaggtgcttaatagtggtacttactgtcaaagcacaaagcagacatttagctagtttttagaaagacagcccagacgcggtggctcacacctgtaatcccagcactttgggaggctgaggtgggcagatcatgaggtcaagagatcaagaccatcccggccaacctggtgaaaccccgtctctacttaaaatacaaaaattagctgggtgtggtggtgtgcgcctgtagtcccagctactcgggaggctgaggcagtagaatcgcttgaacccaggaggtagaggttgcagtaagccaagattgcgccactgcacttcagcctggtgactcagcgagacttcgtctttggaaaaaaacaaagacagcccagaaattcagtcctgtgaatgtctaaattatctgacacagatatgctaggcttacccagtgacaccaagttgctatagttctctaatatcacatctctgtacaaattcctctgatatgagttcaggcattcccattcttcctgagaaaagtctacagccacatctctgaacatcaccaaatcctgaaatgataaacgcatgtattatttgtaagataaatgaaaatattttgaagatggaagaaggtggctgggtgtagtggctcaatgcttataattctagctttgggagcctgaagcaggaggactgcttgaggccaggagtttgagaccagcctagacaacataccaagaacttgtctcaaaaaaaaaggccggcgcggtggctcacacctgtaatccagcactttgggaggccgaggcaggcagatcacgaggtcaggagatcaagaccatcctggccaacatagtgaaaccccgtctctactaaaaatataaaaaattagccaggcatggtggcgggcgcctgtagtcccagctactcgggaggttgaggcaggagaatggtgtgaacctggaagacggagcttgcagtgagccgagatcgcgctactgcactccagcctgggtgacagagcgacagagcgagactccgtctcaaaaaaaaaaaagaaaaaaaaagtggaagaagggttttgatgatacatgttcacttcatacatcaaatgaatagactagggctggaagcctgtgatgtgggaaggtggcaataaagatgtgagtgtgactgaagcagaatatgtgttcttgaagatttctataaacaaaagaccagggtttggcaacattttctgtaaagggccaatattttaggctttgtataccacatatggtctctgttccacattcttctttttttttgtaacaattatttcaaaatgtaattagcttgcaggctgttccaaacaagctacagcttgtgggccagatttatagtgtatctagtttgcccaccactgctatggccaaaacttcctacgtactatggaataggagataattttatttatttccagacatattcgggtaattatcagaatttttcaattaactgaaataggttcataggaacagtacttgcaaaggacctaaaaaattctcaataaatgggatttactctatcttcttttcctttaaagatttttaaaaaataataataattgatggtattctccccaaaaaatgaactgtaaaatgcctatttttaaaaagtatagtttgcataaaacttaaaaatgtcttctagatgtaactttatcataatgtatcattagcatttttattataacagattctttatttaatatttacagtttactgcatgatacagtagttctcccttactcatggttttgctttcctcaatttcagttacccacagtcaaccatggtccaaaaatataaaatggaaaaattccagaaataaacaattcataagttttcaactccatgccattctgagtagcatgacgaaatctcacactaaccactccgccccacctgggatgtgatatgctttgtccagcatatcaacattgtatatactacctgattatcagatcaaaacaacatcataaatatagggttccatactatctgaggttttgaggcatccactgggggtcttggaatgtatcccccttgggtaacgagggactgctgtactccatctgatggatatgttacacttaatagtgattatatttagatatagctatacttttaaatatattatatttagaatttacattacaaaaaatatctaaagctgcttcaatgcccaatattctagtttagcaatatgtggatactgagcacttgaactgggactagtccaaattcacatgtgctgtaaatgtaaaatatataccagataccagatagtgaagactttagaagcaaaaaaacaaggtaaaacatattgatgatttatatatatattctttattttatcttggttttgaggcagggtctcactctgtcacctaggttggaatggcgtggcacaatcacagcccatttattgattacagctcactgcagcctcgaactcctgggttcaagcaattctcccacctcagtttcccaaattgctgagaccacaggcatatgccaccacatctggccagttttgttttgttttgttttgctttgttttgtttttttaagagatgggatctcattaagttgctcaaggttgtctcgaactcctctgctcaagtagtcctcctgcctcagccttccaattccaaagtactgagattacaggcatgagccaccactgtcagggcctgaccatgacttttatattgattacactgtgaaataatattttggccatattgggttaaataaaagacattaaaataaactacatgtgtttctttttactttttttaatgtgactactaaagtatttaaaatatttgaccttgcatactagtctacacttttaaaatttgactactagaaaattttaaattatatttgtagcttgaattacaattattttggacagtgctattttaatcctgagaatttcagataaaatgcccacttctaggaacttcatttctgccccatctctgctctagacagataaggagcacacaagagatgctgaatgatttggtcaatgcacacatggatactggtacaatttggctgtgtccccacccaaatctcatcttgaattgtagctcccataattcccatgtgttgtgggagggagccggtgggagataattcaatcatgggggcagttgcccctatactgttttcatggcagtgagtaagtctcacgggatctaatgattttataaggggtttcctctttctcttggcattcattcactctttgcctgccaccatgtaagacatgcctttcaccttccaccatgattgtaaggtctccccagctatgtggaactgtgagtccattaaacctctttttccttataaattacccagtctcaggaatgtctttatcagcagcgtgaaaatggactaatacagatacagatggagaagacaggggcacttaggaatctggctggctccatcccgtgctggaatggggaagactggggagaagctgttgaatggggctctgttagaaagttgcagaataacaaatgagaatgttcacataacctgaaaaaaatgacagaattccaaagtagagagaaattccaacttacacgagccatgattttagaactgctagaactggtcaattttcctcaaggttcatgtacttcagaagcagggtccacagacaccagagctgcagaaagaacatgtaaaatcatgagaagagaactgcctcagagtttccaaattttaaaaactggtactacttctccattcctatatgcaactcccacccccaacacacagacaagttttgataggtaagaggtagtttagacaaagatgtcctccccaaaaccacagcgaaatcagctcagctgcacaaggaattgaagagcagagactctgcggcatcaaagcatatgtctagacacttcagcaggagggctgccagttggtccccagctctgaccccaaggcgggctggtttggaccaaagaatgggttgtgcagacctgtcctgaacagatcctcctccctccatccccaccttcccagctgaaaaggggctacaccatctaaaccaaaacttccttcttggccttaggaatctggctggcctccccaaacatgaagacaaaaaatagcatagacaagaatttcccaaactttgctcaaattggaatcacctggatatctttaaaatatactgttgcctggctcccacccttaaacacactgatttaattagtgtgacgtgggatttaggattttttttttaactacctcctcctcccatgggtgcttataatgggcagcaaagtttggtagtcaaactttagtatgcatcagaatcacccagagggcttcttaaaacacaacttgctaggtctcactcccagagtttggcattcagtacgtctgggattggacttgagactttgcatttctaaaaagtttccaggtgatgctgatgctgctggtccagatgccacactttgagaaccacaggtataaaacacctgtagaaaggctatatagcagcctttattatggcaaaactgcaggtgcacattgggatcccttccccaaggcttaactcagagctctctgctccttattttcctattcaggatcatcaatattgcctgcatgatctcaattaccaagcaatctttcttggtactcagacttagagaagtaaatttatgaagcctgagtgtggataatgttctagaagctagaaataggctgggtgcagtggctcatgcctgtagtcccagcactttgggaggcccagatgggaggattgcttgatgccaggaattgaaaaccagcctcaacaacatagtaagatactgtctctaacaacaaaaaaatttttttaaattagctgggtgtgttggcacctgcctgtatccctagttacttgggaggctgaggcaggagaattgcttgagcccaggagttcagggctgcagtgagctatgatctttccactgcactccagcctgggtgacaaagtaagaccctgtctcttaaaaaaaaaaaaaaaaaagaacaaaataggaaaaagaaataacctatcagcttatcagtcaaaatctactcgtaactagagagcatattgaaggaactggattggcagatttcaaaaagctatgacacctcatagttactaagctgttggggaaatggatactcaatgatatgatgtacaaagaatgaaataatatgtggatagagtgtttaaaatgggaccaaaaaagctggaaagaacctaaatgtccttcagcaatgtcaaataaattatcatgcattcacacaatggaaaattaaacagccgagtgcagtggctcacacctgtaatcccagcactttgggaggccaaggcaggtgaccgcttaataagtccaggagttcaagaccagcctggccaacatggcaaaactccatctctacaaaaaattaacggggcatggtggtgcacacctgtggtcccagctccctgggaggtcaaggtgggaggatcgcctgagcccaggaggtcaaggctgcagtgagccccgttcatgccactgaactccagcctgggcaatagagtgataccccgtcttaaaaaaaaaagaaagaaaagaaaaaaaaaagaaaaataaacacccattaaaaatgaagataaaattcatatttgatgtcatgggaagatggccactacatattgttgggggaagaagacaggttagaaaatatgattgtaatgtaattgtatttcggcaggtaaactacatacacatgcatacatgtatatgcatgtgtataaaatgatctgtgaattggaataaaattttattgttacctttacttgatggtatcccagtcctaggtgatctttatttgttcttccctggaatctttacattttttttttttttaggcaggcttttgctctgtcgctcaggctaaagtgcaatctcggatctcagctcactgcaacctccacttccagggctcaagcgaccctcctacctcagcctcctgagtagctgggactaaaggcacatgacaccaccctggctattttttaccgcgatgcagtctatgttgcctagcctgctctcaaactcctggactcaagtgatccacctgcctccacctcccaaagttctgggattacaggcttgagccactgcacctggcctgaattttttaattaaaaatttttatcacttatacctgaacaaaaattcaaaacagctatgcaaggaatatcacaaaaagctccaacagttccatccctgctactctgccccatcttccaaatctagaggcagtaatttttacctctattagccattccttttggtatttaaaaaacatgctaatatttccacttctgaattttcagttgtaatcattacatattcacttactactataagaggcatagttttagctgtcttttacctactcaactcccacccacatatgcatagttgcagtccctttgtcctttcaatatgattttcttttccttttttttttttttgagacagagtttcactctgtcacccaggctggagtgcagtggcacaatctcaactcactgcaacctccgcctcctgggttcaaccgattctctgcctgtcccagcctcccgagtagctgggattacaggcacacaccaccacgcccagctaatttttgtgttttttgtagagatggggttttgtcatgttggccaggctggtcttgaactcctgggctcatgtgatcgatccaccagcctcggcctcccaaagtgttgggattataggtgtgagccactgcacccagcctcaatatggttttattctatttcagagtaaatcagtttttaaattcagtttacattactgtgactaaacattgttaccaactgaactatgcagtatactcaggttattttgccttttttgcatatgacttttttttctgagattaaaatgatcttgttttttgtaagtttagttttctaagaaattatcattaattcatttccccgaatcatgtaattgaaggatgaagctcctggtataaaatagcacagctggccgggcacagtggctcacacctgtaatcccagcattttgggaggccaaggcgggtagatcacgaggtcaggagatcaaggccatcctggctaaaacggtgaaaccccatctctactaaaaatacaaaaaattacctgagcatggtggcatgtgcctgtggtcccagctacttgggaggctgaggcaggagaattgcttgaacccgggaggcggaggttgcagtgagccgagatcacgccactgcactctagcctgggcgacagagcaagactccatctcaaaaaaaaaaaaaaaatagcacagctgtctattttatattctaagaatgaaaaatcaatccttcagaaatacagtcaaatacttcaaatacctgtatcccacctggcaaaagtcaattcctaaatatgcctaactctgaaattcacatgactctgaggtgaaaagttgatcaagtcataggagccagaaatcctcctgaaggaattgcttgggcagtttggaatattcctgtccaataagtcatttcttaaaaaatttacaaaacatccataaaatggaatactaaggtaatcactaaatgctaaattttagaaaacagttaaggaaaggaaaatattcaagatacactgaaagaaaaaaaaagtttacaaaacaatatatgattagattttttagaccattaaagggaaacagacttgaacagatgaaaaaaactcttaaaatttcaattctgagattttaaaattaattttaaaatcagatttaaatctcaacttaactgaaatttccataatttgaagaactgtaaatatttggaaggtctgtcaaaccagaagtggatcactgggatgtcacttttctccatacatccatggagtcatataatccacaagagcactgaattcctcttttaaactaagaactagaggtcttagtttcttttaaatttgcaattagtattagcctgttcttcagagagaaaaccaccagccgggtacggtggctcacacctgtaatcccagcactttgggaggctgaggcaggtggattgtctgaggtcaggagttcgagaccagcttggtcaacatagtgaaaccctgtccctactaaaaatacaaaaaattagctgggcgtgatggcaggtgcccgtaatcccagctacttgggagactgaggcaggagaatcacttgaacccgggaggcggaggttgcagtgggccaagatcgcgccactgcactccagcctgggaaacaagagcgaaactccacctcaaaaaaataaataaataaataaaaccacacacaaaaccacacagacttgtagaaatattttgggaaaatatgctctaaaacattaataattattatttctggacattgggaccattgatcattttaattttctttataggttccgtagttactaatatttcacaagcttgtattaattctgtcatcagaaatattttaaaaagctattccaaaaaattttaaatgactgggaagataggctaccttacagtcattaagaaaattgtgggccaggtgcggtggctcacgcctgtaatcccaacactttgggaggccgaggcaggtggatcacttgaggttaggagttcaagaccagcctgaccaacatggtgaaaccccgtctctactaaatacaaaaaattagcctggcatggtggcgggcacctgtaatcccagctacttgggaggctgaggcaggagaatcgcttgaacccgggaggcagcggttgcagtgaactgagatttcggcattgcactccaacccgggcaacaaaatcgaaaactccgtctcaaaaaaaaaaaaaaaaagaaagaaaaaagaaaattgtgattaaacaggccctgcataaatggtgacaacagggaaatcagtgtgactgaaaaaataatttctaccagttcctgagtattgtatctcatcaagaccctgaaatagttctgtgaaggattacaatcctggttcatgtcatttccaaagtgattaagagccagtaagaactgcagacaaaaacaaatgctcatttcacagcagctacttaataacttgcatttacccctcctcagctccaataaataactaatcattaaatacctagcaatttaatatttaaatattacattgttgcaaaataacttaaaaacctttattgtagtatacaagattcatatgtaacaatttcttgatgattcttatttacaacaatacttctcaatattacattatacttttttcttatgactaaatataaacaaaattcttattattgcataacattccatcacatggagtgtgatttaaccatttccatactgctagatattaattttataaaagaacatcccgaaagtcattaccagttatttcatttctagacagtgagaatcaatgttgttggagcttatacaactctgataataccatgaaatgatagacttcctcgctccactgaaaaaattaaccatttacaaatacatacaacaattctgtatataatcttaaaatatctttgttgccctgaaagctcataaacagagtccaaggacttatgttaccaatccctgttctggtccactgcagggtctggctcattttcctgcttgcaagcatccatcataattaccttcacatttgcattggtcttggaaatacacaaagctgataggaaatgactgagcatcatcattttaataccagtagctagtatgaattaaggactcactatgtgccaggcactctcctaagagcttcacaaatattaattcatgtaatcttcaaaacaacaccgtaaagtatacactattacaattctgaggaaattgaagcacagattgcttaaactcgttcagatttaagtggcagtcaggattcaattccacttaatctaggctcgaaattcttaaccactacactacacctccctcagtcgatccaagatatacccaaaataaactcatgctgccagacctcaaaccacatctggctggtaccaaaaacttccactcatgaatttcctggaaaaaaagaaatctccactcctaccccagaaccattaaacatatctaaaccctaaaaaacaaataaaaacaaagtatgaacattaatctccagcacgggtatttccatatcatcaagatccttagaaaaacagcgctcacagagtaattgaatttgcagcctacagttaactaaccatgtgtctaactatagaacagcatgaagtgggcactaacaacgggaaatctattaattaggtcccctgccgttaactaggtagggaaatcctaaggcccaaatcaatgaataaatagatcattcctaagcaggattttaaacggaaggaactcgaatgcatttcacagaaacaaagcagcagcacgaactcacagggaaccggcttttagaagagcagcagcgattcgtttctccttctcaagcgccttctctggaaactggcagggctggggaagcaggcagagttcaggacaccccaggcttttcttgactcgattggaacccaccctccacgcttccctggccccaactaaccgccacctgcatgcacaaatggaaacgacagggcagagggtcagcagtcacccgcgtctgggttcgcagctccgggtacgctgtagttccgcacccggttgcccacgcccgggaccacccactgtgtcttttcggaactgtccagcgtgtcctcctagaccccagacacccaccccaaatctaggtcccagcgttttgcaggggaccttcatcctggggcgttcacctctgacttccctcttgggccttttcgctacggccgagcctaagtggctgaagcgcggacgaggatgcgcggggcctcggtctccaactgcaccacaggccgcacccacgaacctggtccggcacagttactaccgcccgggcctccaggcctcagggctgcagaagctcagtcccgggaaaaaaagcacaccggcctgaggctccacaggaaccttttctccaccttggcccggcctgcaaaacctggcccactccgcgctcttttccctcagaaaagcagcggccacagtggcgcccggctcccagccccagcctcacccgactcagaggatagcccagccctgggagtcagcggcgccagaatacgggagagcgcctgtctccgtcgcgaatgcgctagcgcgcgggggggcggaggcaagtcccgcagctgctccgggccgggaggggcgcgtggggccgggtctcggcggggatagtcgggccggggagacggagccagaggggccgcagtgtccctcgcctcaggcctctacctgtaatggccgccccgtgactgaccagtgccattaaagataatccaggcctgctcccctgtggacactgcggtccaaaatttaaaaaaacaatattccgcctttttatttttcatttggttctcggctcggagacaggcggaggctgcgagccccgccccgcccccagcgacgcctcaccggaacctttggaaatcggcttctgcctcgagtgcgcaagcgcgcggggggcgaacgctggggcccttcagggagcaagggagaagtgtggggccgcacctgccgaggggtcgggaggtttggaggagggtggaggttggctacaggatcccgatggggatggagtgttcaaatctaggcctgtagccgtgaccctggcgtgagttggatggaggaaaccccagtatcgcgagcctggaccaaggcgcggcgcgtgctgcctgtggtgtttgctgagtgacggccgccgcgcccccgcgtacctggaccgagtgcctggccgctggcggagtagtgtttccgtgcacggggctgctgcgtgcgcgtgtgccgttctctagcgggggattaggatggtgccgcagagaaggctgcgcggtggtgcctgactctgacgctggctgtagcgggtctctggggtctttgcggtttgtgtctgcgtttgtgacgtacctgacatcggatctgtgactgtggctctgcctcatccagcgttatttccagaatccttctgatagggcagcgcttctggttctggttttccatggagacggtttgtgggtccctatgaaactgagtgttgggattttgattatctgcatctggcccttgtgtgccctcaggactgtggtgttaggcaagtaaaataattgcaggaaaaaaaattggaaaggaataaggttgctattacttccaaatgatggaattgtaggactgtgtcagaaaattgaataggacaccatgaaacgggagggagaggcattttattttcttccatacctggtcttggaatattctaacaaatgagatttgttttttcccctttgttcctggatgaactcttggataaattcaatgtctccaagcattcttggatagtaagtttctttgatctttagttgaaagatcagcctcattttcgtagctaaaaatacctttagtaataaaaatgttcattgtaatacttcatttaaaatatttaaaactttcttctttctccttgatctcttccagatatctcaagttttggttaagtgaatatgtggagtatatgtactaattacgtcaattattttctctttaaaaccaagtacatttcttacatgagtttgtttatcaaggatttattggttttctttgtacttgttgctattttttagaaatgttccaacagatatgttaaatgttcatcgattattttttcagtggttcaaacatcggagtagaatctctcttccattctgtggctgcaattggactgtacagttgtcctaaaatttaccgtcattgttttcctaagtttgattcttgtttcctagaattcagctaatttttgctaaagttcttttccaataagttccttaagatgcatgtattaaagatgttttttagttctttcatgtttgaaattttttttttttttgagacggagtctcactctgttgtccaggctggagtgcagtggtgcaatcttagctcactacaacctctgcctccccagttcaagcgattcttctgcctcagcctcccgagtagctgggattaaagacgtgcaccaccacgcctggccatttttttttttttttttttttttttatagtttaagtagagatggggtttcaccatgttggccaggctgatttcgaactccagacctcgggtgattcgcccacttaggcctcccaaagtgctgggattacaggcgtgagctaccgcgctgggcctgaaaatgtctttattctgccttcacactttgcctagattcagaatttggaggcgtcacttcacagtgttctagtagctaatgttgtcaagtctaataccaattgttttctgttcctttttaatttcatgtcccactcccaccaacgcccagatacctattgccacctgtaatccacaatgcacttacatttcataatttatgcacttggcatgtatgtttaaacatttttttctgctagttatagggcagcactttataggtctgaacatttttcttcctctttttcttttttgacagtcctctatccttctgaatttttgttctcttgtcctggaatttgtatttcatggaaggacttttcatgagctgtatgttttgtctcctattttttctctttttctcttactttgggaaattttgttgactttacagtacaattgtatttatttttaatttgataatcatttctaatttccaagagctcctttatattctgtaatttttatttcttcatagcctttcgtttttattatggatgcaataaaacctctaatctctcagagggcaattagtttaaagttttctggtgcttttttttttaatctatttttgtcttttatatccaaatcaaattccccctttacaaaaaagtttgaattgttctctttttatactggatacttccctgaaatgtgtggtaatccttgcctctagtcatggagtgaatcttctcaacctgacttcagagccagccgtttcattgggagatgtgagctgttctttagttcctcctttgaggacagtgagttagtgatgtctgagacctcaaagacctctcagaggcccccagttttgagtgtagtttttcatttagtttgcctatgactcagttctgtctttctttatgcaggtatacatcctctctgggtcattttatccacagatcacccccctaccccaatttagtgtatttgatcacataagagaggaaaagtaaaaaaggtgaacagccagtttgtgttcaaactttcaaccaatctcctgtttccagatccacatctctccagggtcatgctctttggtgcctgagcttccaggggtttatgcattgaattgcctcattaatagaaatctgactcctaagccctttcataccagaattcttggacagttctcctgtttttgtgtgtgcgtttttttttgttgttgttgttgttttgtttttgcagtctccctcctcattttctttggttcttacatgttaatactttttatattcctttacttaatatattcattttaatattttttttttgcagaggagaaatgggaaatcaatgcatctacttactctgtttatggagaagcctttcattactcttttaagtaagattttgcttgtaccggactttttttttttacaccagcttatttcttttagttactgcttttgttttctgtttcattaatttccacttttatctttatcagtttcttctgatgacttctcagggtgtattttctacctttttatttacagttttctattcctttcaaattcatcaggttgtattctgaaaaaaacccttggtcttaacttccaacttgctgagagatgttctctagctgtttcagtattttcactccttttttagcccaattattattttttaaaattaattctgaaaaattacagatacacaagagaatgtataaatgtgtttacagttgaatgaatgaaaataatgaaactaattcttgtaccataacttcataaaatatgaaggtctcttaatatgtttttggctaatatttacataggaaaaaatttacactcctaaaactcaatgtgacatattttttattttgaaataattttgaattttcattctcctatagccttcccccagattcaccagttgttcatggttttccacatgtgccttatcatactctgtccatatttatattttttagtggaccacatgagagtaaattccaatcataccctttacatctaattactgaagtgagtctgtcctaagctcaaagacatttagttactttaccattaagtattaaaatcaggaaatttaatattacaaaaatctaatgaatgccctttattaatatattttgccagttgtacctgcagtattcttgaatagcacttttttatttgtctagaattcattgtattatcactgattgaatttggctgataagtatatttagtctttcatctagagcagttcctcagtcttttttgtcatttatgacattgatatttttggaaaatactggccatttgtttgtaaaatatccttcaatttgagtttttctaatgtttcctaattagattcagactatgtatgctttggcacccatatactgtactacactataccatactgtactatatacacagtgcttttccattttatttttgagatggagttttgctctgtcacccaggctggagtgcagcagtgcaatctcggctaactgcaacctccgcctcccgggttcaagcgattctcctgtctcagcttccccaagtagctgggactaaagccgcacgctaccatgcccagctaatttttgtatttttagtagacacggggtttcaccatgttggccaggctggtctcaaactcttgacctcaggtgatcctgaggccatcctggccaacatggtgaaaccccatctctactaaaaatacaaaaattagctgggcttggtggcacacgcctataatcccagctgctcgggaagctgaggcacaagaatcacttgagcccaggaggtggaggttgcagtgagccgagattgtgccattgcactccagcctgggtgtcagagggaaactctgtctaaaaaaaaaaaaaaagtcaaaggagatgctgtcattaacatgtggacagcaggcattggccagactgtcccaggcaaagcaggacatcaggtcatcctaggcttgcaggaccatcacgtcttccctcttccccctgactcaccctaaacactataacaaccagaaacatttccacaaacaaccactcttcctatttggaactattcagaggccttacctgtcatgtggagataatattagtgcctattgcttgggtaaatcatggggctgttgtgaggttaagttacttaatatatgtcaggcattgggaacagtgtgcaaagacacacacactgtacattcaaggatactcactgcaatagcagaagtctgaaagcatcctacaattatcaatgggtcactggttataaaaattggatacctttgtgcattggattataattatctaggataactgtatgtttgtatttgttgaggacagtcctggtttatgtccttgtcctggagtaaatgatatcacccactttcactctcaaaagcatactgctttgaatgttacataatctggttactctttaggtctatacatgtagatataaaattgtctctaagaggctgggcgccacacttgtaattccagcactttggaaggctgagacaggcagatgacttgaggtcaggagttcgagaccagcctggccaacatggcgaaaccccatctctactgaaaacacaaaaattagccagatgtggtggtacacgcctgtaatcccagctactcaggaggccgaggcaggagaattgcttgaacctgggaggcggaggttgcagtgagctgagatcatgccactgcactccagcctgggtgatagagtgagaccctctctctctctctcaaaaaaaaaaaaaaaagtctctaagatgctgggagtggtggctcatgcctgtaatcctagcactttgggaggcctaggcagggggattgcttgagctcaggagttggagaccagcctgggtaacataatgagatcccatctctacaaaaaattttaaaaattagctaggcatggtggcatgcacctgtagtcccagctactcaggaggctgaagtgggagaatggcttgagcctaggaaattgaggctgcagtgagctgtggtcatgccactgcactctagcctgggtaatagagtgagaccctgtctcagaaatagaaaaataaaaataaaatagtctctaagaaagtttaatatgggaattgaataacaattgtttaagtaaaaaaaaactagaaatgtgcaaaaaataggaagtacacttagatgcatacatgtgcttgtgtacggatgggatatctggaatgagatgcaagaaaatgattaagtggatttctgggactgggatagaactgaaggactggtcagaacaggagagaaacttacctttaatgggacatgctttttaacagtttgatttgcttttgaaaagaactatgaacatgtgttaccttttcaccaactataaaattattattattattattattactaagtatatggagagggctcttgacaggaatctgatgtactgtcctgttccatgaattttccatcccagaagccccatggtcagctgggcattgccaatcaatgggatgccgcctggtccagggtcactctgacgcatcagacatctgctttgcttcaattactacagggttgcctttgaagacagaatttccatgcaaggtacaagaagcaggaccaatgataagccttctcttggagtaggagagtggggcaggtagatctcagagtgagctcataaacagagtcctggtgtgtgagtgctggtttcttctacagtgatccgtcccaggactgctgtgacccctgtggggaaggagcccgcatagctggtgttgctgtctggagtagaatcctgtgccccactcttctcatgtttggatatatctactaaacctcttgttttaatagcaagacattgagctgctgacaacccataaaaggtacagccttggctgggcacagtggctcacggctgtaatcccagcactttgggaggccaaggcaggtgggtcacctgaggttaggagtttgagaccagcctggccattatggtgaaaccccatctctactaaaaatacacaaattagccaggcatagtggcaggcgcctgtaattccagctactcaggaggctgaggcaggagaatcgtttgaacccgggtggcagaggttgcagtgagccaagatcatgtcactgcactccagcctgggtgtcagagtaagcctccatctcaaaaaaaaaaaaaaaaaaaagggtacagctttaccctgcaggatgtcagtatgtgagtaaattctttgacttgatttctcaagtggctacacagtagggcagaaattgcccggcctgtttcacggaactgaggcccagacattttcagggcagaattgcaggtagaagaatggcagagcttgttggctgggacttccctaggagaggtgttgcctgtgctggggacttggtggtgtggaagcagttggggatttcactatgagattgaagtgaagtcattattgagtcatgaatggagtgtaagtgtggcttgtacctgtacatgccagccctggcaagagtctccggtccagttgcaggggtgccataagcagcgaacagcctttggccatgaggtcctgttttttcccctttcccaggttgttggtgatggggttaactggacccaagatgatgagagagaagggaagcaggtccgagccacactcggagctttgacatctggagctcaaaagatgtgggacagtgtgtgcctctgtgtagggagggctccctgcaagccaaagctcttggtttacaattgggcgtatcaattaacttgacccagtcaaggtgaatctcagaggattattttggaatgccaggcaaaggtgctctccctcttgtactggaggggatatgtccagataggaggcctggaactgatgcagtcatgaggaaattagcctcaagccaaagccaaaacactggcaaagggagagctgagtgttcagtgttgaaacctgatgacatagtgaacatcttgatcatgccatacctgaagctccatttatctttggactttttggttacaaaagccaaaaaaaaaaaaagtcattaatttttttgctaaatgaactattttttacaatggttttagatttatgtaagacacaaagatatgacaatttcatacactcacaccaggtttcccctagtagtaacacttaccttaatatgatacatttgttacaattaaccaatactgtcagggaacagggcccatgcctgtaattccagtgctttgggaagctgaagcaggacaataacttgaggccaggagtttgagaccagcctgggcaacatagcaagacccttcactacaaaaaaatattttttaattagccaggcatggctggtgctgtggctcatgcctgtaatcccaggactttgggaggctgaggtgggtagatcgcctgaggccagaagttggagatgagcctggacaacatagcaagaccttgtctctactaaaaataaaaaaacaacagctgggcatggtgacatgcacctgtggtctcggctactcggaaggctgaggcaggaggattgcttgagcccaggaggtggaggttgcagtgagctgagattgtgctactgcactccagcctgggtgacacagcaagagtctgtctcttaaaaaaaaaaaaaaaaagccatggtggcatatacatgtacctgtaatcccaacactttgggaggctgaggtgggcagatcacaaagtcaggagtttgagaccagcctggccaatatagggaaatccgtctctactaaaaatacaaaaattagccaggcatggtggtgggtgcctgtagtcccagctactggggaggctgaggcaggaaaattgcttgaaccccggggaaggaggttgcagtgagccaagatcacgccactgcactccagcgtgggtgacagagcgagagtccatctcaaaaaaaaaatttttaagtatgacatagtgtttaccaagcaaatttggaaggaacaggtaatcaccattaaatgtttatcaattatttctataagattaaattacttttccaaaaatggacaatggtggcatcccaaaattctatgatacacttttatgtcttttgtgtctttttatgaagctagctataaaaattaccagtaatcaatgaaaattaggagacaagtaaggaaagaaaaatgaatatagaataggcaacttaaatgaaaattacataaaagcattgatagacataaaccttgtcagtaattccaaaagtgagtggactgttatagttgaaacttttttttaattagaaaatactaatctgggccgggtgcagtggctcacacctgtaatcccagcactttgggaggccgaggcaggcggatgatgagatcaggagtttgagaccagcctggccaacatcatgaaaccctatctctactaaaaatacaaaaattagcggttttgatcatttacagtttcaaagtatcttcccacaaaacacttagtaattaaaaaggggaatatgataattttagaatggacaaacctggtcaacaatactttaatcaagagatacaggttagcatcactaatgtgatgcactgttaataaaaaaggaaaggctggggcacggtggctcatgcctgtaattccagcactttgggaggccaaggcaggcagattacctgaggttaggagtttgagaccagcctggccactatggcgaaaccccatctctactaaaaatacaaaaattagccgggcgtggcggcgtgcacctgtagtcccagctactcgggaggctgagtcaggagaattgcttgaactgggaggcagaggttgcagtgagctgagatcacaccactgcactccagcctgggtgacagagcaaaactccctctcaaaaataaaataaaataaaatggaaaagcactgtgtatatagtacagtatggtatagtgtagtacagtatatgggtgccaaagcatacataatctgaatataataattaggaaacattagaaaagctcaaattgaaggatgttttataaaacaaatggccagtattttccaaaaatgtcaatgtcgtaaatgacaaaaagactgaggaactgctccactatgtcctgccaaaaaaaattttttaatagagttgaggtctcactatcttgcccaggctggttatcaagctcctgccctcaaacaatacaccagccatggcttcccaaagcactggaattacaggtgtgagctaccatgcctggcctaagtaatagcttttaaaggtaattatctttgattaatttttcaatgtttttgaagggataatttttttgaaagacctttctgaaggtctttccccatatctaacattcatagggtttctgattagtatgacttacttgatactgagttaactgaaagttatgaccaaagtctctgccacattccttatattctctgcatttctttccagtgaaatttctctgatgttccatatgatttgtgcaaaatataaaggtgctcccacacatttcattaagcttatcactggcatggattcttccttgtggagtaaagttttcacattttggcttcattcagactttctatagcttcaagtttggcttcattcagattttctatacctcagtgaaccaactagaaacatttacatattcctgtaaaatgaagtttaccatagatattttaaatttaattgaaatactaaacaaaataattcataatattaaaaatgcctgtaaaatttccatgttcccatttgcactgatgcatttatgttatttctcttactcatctcaatcataactggcaaatttagtctatattactggttatttcaaaccacttttagataaagtccactttctgtttagctcattttctttttaagtaattcattcaaattcactgaataaacagattgatttgtgaatacgtttccagcgtcaattttgggtttgttacttttctgcttgaatgtttattcagatgagccatatacctcaggttttattatgcaacactctcactatctttcatatctaaacagcttgttatttcagattacatttttcacttaatccaagaactatatatggtggtgtttataaactgcaaatttttaaaatttaccttttgtatctacttgtcttgtttttttttttgagataaaatctcactctgttgcccaggctggagtggagtggtgagatctcggctcactgctacctccatctcccaggctgaagcaattctcctgcctcagcctcccgagtagctgggactacaagtgcacaccaccatacccacctaatttttgtatttttagtagagatgaggttttgccgtgttggccaggctggtctcattgtttttttctttttttttttagacagagtcttgctctgttacccaggctggagtgcagtggcacaatctcagctcactgcaaactccgcctctcgggttcacaccattctcctgcctcagcctcccgagtagctgggactacaggcacccgccaccacgcttggctaattttttgtatttttagtagagatggggtttcactgtgttagccaggatggtcttgatctcctgacctcgtgatccgcccacctcagcctcccaaagtactgagattacaggcgtgagccaccaggcccagcctggccaggctggtctcgaactcctgacctaaagtgatccacctgcctcggcctcccaaagtgctaagatgagaggcatgagctaccacacccagcctgtcttgagttactgtcagaaaacgtacactgctttttgaaacttgcttcagatatatcacttctcatatcaactttactctaaaaaaatttacttactatatccattcagtgtttccagagtgaattttctgattcaactaaaataaatttaaatgaatgtttcctcatactcactatattctaataattttcattccagaataaattatcatagatttgcagtcagagaaattgtgatggtggatttcattatattagtaaaatctgcataattaaatgttcttatataaatattccaagagtagtaatgaaggtgataatcatgacagccaatatttactgaatagtttctatttgccaataactattcccaaagtctttggataaactcatttaatcttcacaataaccttatcacaatgtaagaaatttgtaatctgaagtatacagtttaaattacttggtaataaaacagacgtggaaactggtgaaagtataatgatgctgaaaaagattcgtgtaatagataaaagcttttctacattcacaaagtcaacatgattattctctatatgctattctctataagtcaaataaaattttagtggtaatgtttttattaataattgatattctattttttccatataaattctgatgcttaataaattgtgaattatgaggtaaaaaaatttacagtcactggattttcttcacttacaaattgtttgctattccataattgataatttcaaaatcaaggatttcctatattaatcacactatacattatataatgttgagtatattgtgagagtagatctttacacatatcgggctttcattaggcttctcacctgtacaaattctgttatgaaaaagtatagctgagggacaggtaaaagtgtttcccacatttcttatatttctgaagtttctctgcaatgtgaatttggtgatgttagataaggattgttaaataaaaagacgctattcaaatacataagatttgtcccttcatgtatgtattctctggtgctttttcacctatgaaagacaagaagaggccttctcacattcattacattcatagggtttctcaccagtaggaattctttgatgttgagtaagatgcgccctctgcctaaaggccttcctacattcctgacattcaaagggtttctcaccagtgtgaattctctggtgttaagagttgaacaatcaataaaggattttctacattttttacactgatacggtttctcactagtgtgaattctctgatttctattaaggtaggaaacaagcaaaggccttcccacattccttaaactcatagggtttctcaccagtatgaatattttgatgttgactaagatgggctctctgcttaaaggccttgctgcattcctgacattcataggtttctcattagtatgagttctatagtgttgaataaatgttgaataacaaagaaaagcttttttacaatctttacattcatagggtttgtcaccagtgtgaattgtctgatgtttattcaagtttgaaagccaagtaaaggtctttacacattccttacattcatagggtttcacactggtatgaattctttgatgttgagtaagagttggataattattaaaaaccttcccacattctttacactgatagggtttctctcctttgtgaattctctgatgtctattaaaatcaaaaaaacaaatgaaggcattcccacattcattacattcatagggtttctccccactgtgaattctctgatgtctcattagatgtgcattatgcttgaaggccttcttgcattactgacattcataaggtttttcattagtatgtgttctctgatgttgaacaagtgttggacaggagacaaaaaccttcccacactgcttatattcataagccttctcaccagtgtgaattctctggtgttgaataagagctgaacaattgttaaaagctctaccacattctttacattcatagggtttttcaccagtgtgaattctctgatgtctattaaaatcagaaacacaagtgaaagccttcccacattacttacactcatatggtttctcaccagtatgaattctttgatgttgagtaagatgtgcactttgcctaaaagcctttttacattcctgacattcataagatttctcattagtatgagttctctggtgttgagtaagtgttgagcaattattgaatgctttgccacattccttacattcaaaggacttctcaccagtgtgaattctctgatgctgaataagagttgagcgattgttaaatgccttcccacattctgtacattcgtaaagtctctcatcagtgtgaattttccgatgtctattaaatcagaaacagaagcaaaggccttccaacattgcttacatttataaggtttctcaccagtatgaattctttgatgtcgaataagatgtgcactccgcctaaacgtctttctacattccagacattcatagggtttctcactagtgtgagttctcttatgttgaatcaatgttgaacaacagataaacactttcccacattctttgcattcatatggtttcccaccagtgtgaattcgattatgttgggtaaggtgggcacgctttctaaagggctttccacatatctgacattcatagggtttctgattagcatgacttatttgatattgagttagttgaaagttacaagcagtctctgccacattctttaaatacattgcatttctttgcattaaaatttgtctgatgtttcatatgatttgtgcaaaatacagaggtgttcccacacatttcgtcaagcttgtcactgatatgaattcttccctgttgagtaacattttctcatttttttttttgttcatagagtttctttccagtatgaattatttgatttagaagaaaatatgtaggctggatgaattcggatattttttcaaatggcacagttacatgcctgaaatattcctctgtagtttcctgttgtctctcaaagagtcctttgcatttccaatcatttcccaaaaaagattcctcaaggcaagaacttctgacactttctattattttccattttaatgattccttttcaaaagtgccattcttaagagttaactccttggtctcatatctagacagcatatcttaaagaaaataaacatcatgttttcctcttttatgagaaataaaactgcatagaagcagtcaaacagataatattgcccttaagcaagaaatggcttagataacttttaaatcttggcatttaatttgcagaaaaaaattgttggaatggctatattaatatcagatgaaacagacttcaagttactctatattatcaaagataattttctcataatgataaaagagttataataactcatcaggaagacttggcaatcagaaatgtgtaggtgcagaataacagagcctgaaaatatatgaagcaaaaattgacaaaagtaaagcaggaaatagataattctacaatcatagttggagattttgcaaccatctctcaataactgatagaacgactggaacatccccctcccccagaaaattagtaaagtaatagagcatataagtaacactgtccaccaccttcaactagttgatatacacaaaacacaatatcaaaaactgcagaatgtacattctcttcaaatacctatacattcaaaatagaccatatgctgggacattaaacaagtctcaatacactaaaaaggatcaatgtcacacagaatattttctttgatcacaatggaactcagtttgaaattattaaaatttctggaacctgtcccccaatacttgaaaactaaagaatacacatggaaattagaaaatacttagaaatgaacaatataaaagtatagcacaccaaaatatgttatatagctaaggtaacatttatagtgaaacctatagctttaaatgcttatattagaaaagaaaaatgtataaaataaacaacctaaggttttactgcaagacagtagataaagaagagcaaagcaggccaggcaaggtggctcatgtctgtaatcccagcactttgggaggccgaggcaggtggatcacgaggtcatgaatttgagaccagcctgaccaacatggtaaaaccccgtctctactaaaaatacaaaaattagccgggcgtggtggtggatgcctgtaatcccagctactcaggaggcagaggcaggagaatcgcttaaacccaggaggtggaggttgcagtgagccaagatcgtgccattgcactccagcctgggcaacaagagcaaaaactccatctccaaaaaaaaaaaaaaaaaaaagagcaaagtaaatctacaattagtagaagtaaagaaataacaaggataagagcagaaatcaatgaatgagaaaagtgaccataacagagataattaatagtcaaaaactggtttatggaatagattagcaaacttgataaaccttggagccaaactaccaataaaaaacaagaagaaaaacacaaataccaggaacaaaaaggggtttctaattataaaccctacataaataataaaagtaaaaattaaacataattacataagaaaatatgaaccatttaatatccagaagtataagaagttagagaaaatggacacattctttgaaagacacaaactaccaaggatcagtcaagaagaaataagtaaaacaagccaggtgcagtggctcacatctgtcatcccagcactttgggaggccaagacagatggatcgcttgagcccaggactttgacttgacaccaggctagccaacatggcaaaaccccatctctacaaaaaatagaaaaattagcccggcatggtggtgtatgcctgtagtcccagctacatgggaggctgagcccagaaagttgaggctgcagtgagatgtaatcatgccactgcactccagcctgagtgacagagcaagaccctgggagtgagggagggatggataggggggagggatggagggagggaggaagggagggaaggagggaagggaggaagggagggaggaaggaaggaaagaaggaaggaaggaaggaaatagctgtctatttatcactgaagctgaatttatagtaaaaacattgccccaaggacaaacatggcccaatgactttaatggcaaatcctatcaaatagtcaaagaagaaataactcacagctaattacagaagcccaccactaccctgcaactgaaaccaaaaaaccattcaaaaactacaaattttcctcctgaatgatcatgcaaaaatccttttaaaataatagcaaatagaatccaataatatatatattaaatccataacacaacattcaatggcatttacctcatgaacaagtcagcttagcatttgaatatcaattaatgtaattcaacatattaacatattttaaaagtcaaatgacatgatcacttgaataaaaacaaaatactcttaaaaaattcaacacagaatcatcataaaaattcttgccaaactaaaaacagaaggaacttactttctcaagtaaaggacatcattcaaaaatctacaagaaatatcgtagtcagtaaaaaaaatattgactgggcgcggtggctcatgtttataatcccagcactttaggaggctgaggtgggcagatcactcgaggtcaggaattcgagaccagcctgaccaacatggtgaaaccccatctcgactaaaaatacaaaaattagctgggcatggtggcacacgcctgtagtcccagctactcgggaggctgaggcaggagaatcacttaaacccaggaggtggaggttgcagtgagccaagatcataccactgcactccagcctgcacaagagggtgagactctgtctcatcatcataataataaagaagtcttttttccttagatcagaagcaatgggagtgattaataggtttttttatcttaattatggtgatggtttcatgagcaaacatgtacacatataaagtataccatttcacacatcaaaatttgtcaaaccatgtactttataacatagctggttcattatatgtcaattatgcctcaatacatctgctataaaaaaaagttctttgtaaatatttgaaatacttcccatttgtcaaactttttctcccaagaccttgggcctctgagggaaggtttccacacaatatctcaaacaaaagacatcaccactctgaccagtttgggcttccctaaaatgcacttctgctgggagtaccccaacacccttacccacctggataccaccctgttttcccagccatccagggttctttcccttgttccaatagggaaatcactgatggcttagaaatggcaagtcctgctcaaagaaataggatactaaaaataaataagccaaaaaatgttcttatttagaattggtttaacctaaagctaattcaggttcctctgaagactgatggaaacagaaaatcataatttggcaaacaccagaggaaataactactgtcagagccaagtgtagtggcacacgccagtggtcccagctacttgggagtctgaggcgggaagactgcttgaatccaggaggtcaaggctataatgagccaagatcatgccactgcactccagcctgagtcacagagcaagaccctgtctcaaaaacataataaccataactgttctctgcaggaatcactgatgaaactaaagtgataaaaatgtcatgagcaagagggtatttgtagagcctcaaatttctttacaagttacttactgattgcaaaggtaaaaatagtggctttactatgcggaaccctagaggataccatttcaagcatcaaaacaagatactgtttttgattggccattatttatgtcctgatacaatgcactgaaaaaggcatcacttctgtagtattcttcccaaaaatacataactttaaagtaatcataaaaatatgggtcaaggccgggcgcggtggctcacgcctgtaatcccagcactttgggaggctgaggcaggtggatcacgaggtcaggagatcgagaccatcctggctaacacggtgaaaccccatctctactaaaaatacaaaaaaattagccgggcatggtggcgggcgcctgtggtcccagctgcttgggaggctgaggctggagaatggcatgaacccgggaggcggagcttgcagtgagctgagatcgcgccactgcactccagcctcggcgacagagcaagactccgtctcaaaaaaaaaaaaaaaaaaaaaaggacaaatctaaatccaggaataatctatgtaataacaggccagcacagtttaaaagtgttaattagggtcataaaagagaaaaaacatttccaagattgaagagggctacagatacaagacaactaaatgcaatgtgggatcctggatcagtacaagtgggatcctggatcagtaccaggataattaatgacatttgaaaaaaggaaatagataacttaatattatatcaattttactttttggtttagatatttgtactatgcttatgtaaattattagcattagggaaaactgactgaagagtagatggacatttggcatactggttagttctagctctcgaaatcatttcaaaataaaaagttttggccaggcatggtggctcatgcctgtaatcccaacactttaggagggcgaggcaggctgatcatgaggtcaggagatcgagaccatcctggctaatacagtgaaacctcgtctctactaaaaatacaaaaaattagctgggcgtggtggcacatgcctgtagtcccagctacctgggaggctgaggcaggagaatcgcttgaactcgggaggcagagattgcagtgagccgagattgcaccactgcactccagcctgggcaacagagcgagactccgtctcaaaaaaaaaaaaaaaagtttggctgggcatattggctctcgcctgtaatcccagcactttaggaggccaaggcaggaggatcacttgaggccaggagtttaagataagcctaggcaacatagcaagaccgtatctctacacaaatttaaaaaattagctgggcacggtggcacacttgtagtcccagctacttgggaggcagaggtgagggaatcacttgagcccaggagtttgaggctgcagtgagccacaatcataccactgtactgtagcctgggtaacagagtgagaccttgactcaaaataataataataataataataataataataataataataaataaaatttaaaaatgggccccagagaagcttttggataaaagaatgatgaagacgtcagaatacattcacattaagctgacctaaggaacacaaggaacaaagagacaaatgaggcagaaaggtcttagttaaatttaaatctacgtgggctctatctctacttatttgggtaagaaaaagcaagaagcctcaagacagaatcaatgtgtcttcctgtgaaatgtcaaattcctagaatgtagctctcaaacataaacataacagggtatgtgttttcctaaattgtagatgaaccatcacgtcttaaatcctacaggttattatataaatgtccctcgaccatcatctagctccttaaaaatcaagaaaaaactcagttacataaggagcccagggaaagagtgaaggtcagtgaagaacaagaaatatgaaggtgcttgagagtagcaatctattccaagaaaacaaaactcaaaccagttttttggaacatggaacagaaatttagatatttaatgcagccccagaattcccagtggagagaatattttctgaattacagggaacaggtgatcttacccggtgacacaaagttgctgtagttctccaacatgacatctctgtacaagtctctctgagcagggcccaggcattcccactctcccttagagaaatctatagccacatccctgaatgtcaccaatcctttaaaggaaaagtccatttaacatatgtaataataaagaaaatatattttaggtgaatgataaggacataaaaagggattttcctagaaggcattctatagtaagcagtaggttgaaattggaaacttatggaggcggcaataaggaaatgaatacacacatattgttgagcagtcctgtgctgtgaggtagatacaacatcctgccactgtgggaaatttctattaatcggaacatgttgagaagccaacagtgtaaaacaatgtaaattgaaactgggccaggcgcagtggctcttgcctgtaatcccaggaccatgttttatttctcctaatttgaaggaacttaaaaggctgaaatgcaaagatgacactgagaaacctgatcttgaatcgctaaggcaacagcctgacaaattaatcaggatgacgaaccaagctaggaccaaggctatatccatgtgtgtgagttaagaccagggatggaaaagaaacatttctaggactccttgacatggagcccagtgcagtgtgattccaaaatctgttggtgataccctaatagggactacagttagattgggaggatatggggatgcagtggttgattgttattaaggtgaaagtttaaatgaaaactagaaggtctgaatggaccttatgtgaagtggttacatctccttacctgaatacataatggggaagggtattatgtctgactgaggaacacttctcctacctagtattttaaaactaaaggcatgtaagtttgtccttcaatcaatgttattagacaggccaaacaggaacctatagaattgctgaagcccacataggttgttaattttttttttttttgagacggagtcttgctttgtcacccaggctggagtgcagtggcgcaatctcagctcactgcaacctccatctcccgggttcaagcagttcttgtgcctcagcctcccaagtagctgggattacagacgtgtgccaccacgcctggctaatttttgtatttttagtagagacagggtttcaccatgttggccaggctggtcttgaactcctgacctcaggtgatccacccgccttggcctctcaaagtgctgggattacaggcatgagccaccacacccagcctatgtaggttgttaatttgaagctgtatagaatacctggtagatacaagagattaccacttcattaataacatgttagaagctagagtgctggtaccaaccaattctctatacaataaccctgataggtctgtgccaaagggggagactaacagtagattgtcgaggcttgaatgaagtagtaccaccgaattaaaggacaccagtactctgactaatcttgcaaatgcttttttcattatcccaatcttgggaaagagacaaccatagtttgccttcatgaggggacaatcccaatttatatctactgtattctcacaggttatttgaattcactagcttactattacaatttgattaggaaagcgtggacttgagaccagtcctaagtgtaacaatatactacattgatgataatgataacatcagaacctgaagaacaaattaggtctgatttccagcagggaaggcccacgcggagaggtagcatagcatgtagactctatccgatggccactggtagccctgggagcctacaaaaggatcctggcagtggatagacacacttcccctgtggtagatgtaaaggctcaaaatactataaaactccttgaatagaaacgtgccaattggcattgctgtgttatatttattcagaccaaaagaaacactttacaccccgcagtgtccaacaatgtccaaagagttctcacatcaattggatataccatgatgcatatcatcctcaaagtagtggtttggtagacaattagaataggagagctatagagttgttggctaaagtaagggaaagtaaagtatgggctggcttgcattccttcatgaggatgtgcttactctcaagatggggaaagccaaagacagtctccactagagagattcctctactgtcgtgggcaattaggaggagagggtgcatggcagaatgctggcacagttacacaaatcttccccaaataacctcaactttcttttttcctacctgatgcagtggccctgggactatgactgtaactccaagtgacagaagcaggggtgatccctaaacaagaaactggaactttacctttcaatcttttttaaaatgttatttatttatttttagagatggggtcttgatagttgtccaggctggacttgacctcctgggctcaagtggatcctcccatctcagcctcccgagtagctgggactgcaggcacataccaccatacctggctaatgaagtaacagtgaaaaagactggcttcagggagaatttaaccaaccatcagctaatttctacgctcaatagttctgtacaagtttatcatgtggcacataacagtagattcaaggagggaaatgagtaatcaaattaatacaaaaatatgagaatgcatgtaatggctttattggataggttagttgtttctttaaatccattgctactccatactggctccttgaaatgatagccatctacatcctgatactattgctgtttctgtgtagctgctcaggtagttttgctacaagagagcctaagccaaggcctgggtgagtggacaggtaactcagtacacctggaatgctcaaatcctgcacgtgccaaagaaagaactggcccttgactggctcttgggagataacctctgagcccttaaaatatcctacctgataagattgtttttgtatgccacaggccttggagcatgctgtatcagtttgacatctggggaactggagactgagtagctaaagtcaggtattgagtgataaatccctgcaagactgactccccaataaaaactctggaaaccaaggctcaagtgagcttccctggctggcaatagttcacacaatgttgtgacatgtcattgttaggagcattaagtgtgtccctgtatagctcctctggaagcagccacctgaaagcttgtacctggtttctcctaacctttgtccatgtaccttttctttctggtgactttagtatgtatccttttactagaataaaccataactgtaagaataacagcttttctgcatcttagcaaatctttgaggctgatagtctctaaagttcttagtacagtttctcttttcacaaaataaaatggaacatttgagggaatcttcccaaaatatcttattaaaacctctatcgtgtaatgaatatgttaattagcttgatagtggcaatgacttcacaatgtacatttctatcaaaagattaaatatataaatatatatttaaatatataaaatttttatgtgtcaattatacctcagtaaagatgggcagggagtacctccatctcagcggtccccaacatttttggcatcagggactggtttcatgaagacaatttttccacagagtagggacagggtggtttcaggatgattcaagtgcattacatttattgtacactttatttgtattattattacattgtaatatataatggaataattatacaactcagcataatgtagaatcagtgggagccctgagcttgttttctgcaactagacagtcccatctgggggtgatgagagacagtgacagatcatcaggcattagattctcataaggagcccacaacctagatccctcacatgcacagctcacaatagggttcacgctcctatgagaatcaaatgccgccgctgatctgacaggaggtggagctcaggcagtaatgtgagtgataaggagcggttgtaaatacagagaaagctttgctcacttgcttgccactcacctcctgctgtgtggcctggttcctcacaggccaaggaccagtactggtctgtggcccaggttttggggacccccgctctatcttaataaagaggatacaaataaatttgaagacttccttgcagaagatgcaaataaatttgaagaattctaaaacaacaactactaaagaaatttcaatagagaggtaagatgctacttgaaatcaaggatttgaatggtagagtgtagggaccagccccacagggtcggtgggtctctccctgtgcacggcgacgagagagtgtagaaataaagacacacgataaagagataaaagaaaaggcagctgggcccgggggaccactaccaccaatgcgcggagaccggtagtggccccgaatgtctggctgtgctgttatttattggatacaaggcagaaggggcagggtaaagaatgtgagtcgcctccaatgataggtaaggtcacgtgggtcacgtgtccactggacagggggcccttccctgcctggcagccgaggcagagagggagaggagacagagagaaagacagcttacgccattatttctgcatatcagggactattagtattttcactaattgactactgctatctagaaggcagagccaggtgtacaggatggaacatgaaggcggactaggagcgtgaccactgaagcacagcatcacagggagacggtcaggcctctggataactgcgggcaagcctgactgatgtcaggccctccacaagaggtggaggagcacagtcttctctaaactcccccggggaaagggagcctccctttcccggtctgctaagtagcaggtattgttccttgacacttttcgctactgctagaccaccgtccgctcggcaacgggcgtcttcccagacactggcgttaccgctagaccaaggaacccttctgctggccctgtccgggcataacagaaggctcgcactcttctcttctggtcacacctcactatgtcccctcagcttctatctctgtatggcctggtttttcctaggttatgattgtagagcgaggattattataatattgggataaagagtaattactagaaactaatgattaatgatattcatatatctctaagatctatatctggtataactattcttgttttatattttattatactggaacagctcgtgtcctcgatctcttgcctcggcgcctgggtggcttgccgcccacagtagagcaacaaagaaatatcatttcccagttatgagattagcaaaatgagacaactggttacaccccatatgattacatgagaaataatctcagggcatcctgcacataagattatatttagaaaaatgtatgagcatgtacaggcatgccttaaactcagcaattatacatcttagattctattcaaatgaagatttaaatgtgtacaaagaggaaacagtttaacaaaccattattgtattaatataatgaaaaacaagataatcataaaactgatagctttgccaggcacggtggctcatgcctgcaatctcagcactttgggaggccgaggcaggcggatcaccaagtcaggaaatcgagaccatcctggccaacatggtgaaaccccgtctctactaaaaatacaaaaaaaattagctgggtgtggtggcgtgcacctgtagtcccagctactcaggaggctgaggcagaagaatcacttgaacccaggaggcggaggttgcagtgagccaagatcatgccactgcactccagcctgggcaacagagtgaggccccatctcaaaaaaaaaaaaaaaaaaaaaaagatagctttggggtggggcgcagtgactcacacctgtaattccagcactttgggaggccgaggtgggaggatcactcgaaaccaggaattcatgaccagcctgggcaatgtagagagaccccctgtctctaaaatatatatatataaactagccaggtgtggtagcccacacctatagtcctaactacttgggaggctgaagcaggagaatccttgagcccaggacattgaggctgcagtgagttatgattgcaccattgcactccagcctgggagacaaagggagaccccatctcaaatctcaaaaaaaaaaaaaaaagtttctccttaatttgtaacatgaaaaatcttttacctcaattttctagtgaacagagagcattattaaacggaatagtcattgtcatcctagagttatcaaacagaagagtgactgtcaaccacttttggcagaaaacccacacgtgtgtggatatatataagatctggaaagatttttcgttgttgtcgtactataggtaatctttactttgtgattttccacattttctgaatttttgcattgaggatatactatcttttaccatcataaaaaacaccactaagcccaggcaacatggtaaaaccccatctctacaaacaatacaaaaattagctgggcatgatggtgcgtgcctatagtcccagctacacaggaggctgtggcgggaggatggcttaagcccagcaggtcaaggctgcagtgagccataatcgcaccactgcattccagcctgggagacagagtgagaccccatttccaaaaaagaagagtcaacaagttttaaaaaatcaagaagttcataaagtaaaaaaagttacagtaagctaaagttaatttattattgaagaaaaaaattttcacatatttagtgtagcctaagtatacagtgtttctagtctatagtggggtatggtactgtcctagccttcacattcactcaccattcacttactgactcacctagagcaactttcagtcctgcaagctccattcatggtaaatgccctgtacaggtgtaccattgtttactttttatacctttttttttttttttttttgagatggagtcttgctcttgtcacccagtctggagtgcaatggtacaatcttggctcactgcaacctccgccacccaggttcaagcgattctcctgcctcagcctcccgagtagctgggattacaggcacctgccaccacacccagctaatttttgtatttttagtagagacggggtttcgccacgttggccaggctggtctcgaactcctgacctcatgatccacctgccttggcctcccaaagtgttgggattacaggcgtgagccactgcgcctggcctataccatatttttactgtaccttttctgtatttagatatatttagatacataaaatcattgtgttgcaactatctacagtattcagtacagtaaaattctatacaggctggtggcctaggagctgcaggctatactatatagcctgggtgtgtagtaggctatcccatctaggtgtatgtaagtccaccctctgatgttcacacaatgatgacatcacctaacaacaacattacctaacaacagaagaatgtatccctgttcttaggtgacgtctgactgtatatctaacattaaaagtttatttacaaaaataaactttatttacaaaaaaactttatttaaaaattacatggcataaggccgggtggagtggctcacgtctgtaatcccagcactttgggaggccaaggtgggcggatcacctgaggttaggagttcaagaccagcctggccaacatggtgaaaccctgtctctactaaaaatagaaaaaaaattagccaggcatggtgatgggtgcctgtaatcccagctattcgggcggttgaggctaggggaattgcttgaatccagccagtggacgttgcagtgagccgagattgcaccactgtactccagcctggacgacagagaaagacttagtctcaaaaaaaaaaaaaattacatggcataacgcttacgacacaaaatctctttatctccagagtttctatgtattcaagatggttttctcataaaacagcagaggttactgtggtcagaatgtcaccttcccatgagcccacaaggaaaagcatctgtgtttcgctagttcctgtcacactttaatctatttctgtatagattatatgtcccttgctagattgagagaaacttaactagggctttctaatcacttcatttctcccaagtattagcacagaatcattgatattcctggcattaataaatgcttaatattttacctaaaaattctatacttgggaagttatcaataaacgaaacctagaaaagtgcaaaatttagtgaacacaagaatatatcacagaacagttacatgacagatgactgcactaccattaacagctatgaccaaacattttaagtaaaaaggaaagatatacgtgacgaattactacgtaagggggcaggtctttaaaagaacctataatttggctgggagtggtggctcatgcctgtaatcccagcattttgggaggctgaggcgggtggatcacgagatcaggagatcgagactatcctggctaacacggtgaaaccccgtctctactaaaaataaaaaaaaattagccgggtgtggtggcgggcacctgtagtcccagccactccggaggctgaggcaggagaatggcgtgaacccaggaggcggaggttgcaatgagctgagatagcaccactgcactccagcctgggcaacagagcgagactccatctcaaaaaaaagaaaaaaaaaatagagattgagaccatcttggccaacatggtgaaaccctgtctctactacaaatacaaaaattagctgggtgtggtggcatgcgcctgtagccccagctactcgggaggctgaggcaggagaattgcttcagcctgggaggtggaggttgcagtgagatcgcgccattacactccagcctggtgacagagtgagactccgtctcaaaaaaaaaaaaaacaactataattttagaagagcatataacacaataatttaaaatgcagctcagaggccagatgcgttggctcatgcctataatcccagaactttgggaggccaaggggggcagatcgtttgagcccaagagttcgagaccagcctgggcaacatagtgaggccctgtctctacaaaaaaaatacaaaaattagccatgtgcagtggtgcacacctgtagtcttagctactcgggaggctgaggtagaagtatcacttgaacacaggaggtcgaggctgcagtgagctgtgattgtaccactgcattctagcctgggtaacagagcaagaccctgtctcaaaaaaataaataaaataaaataaaatgcagctatgcttatagatgcctgtgatgtgactcttgataagtggatttttagaaagtcaccaaatgaagaaacagagagcacaccggagaagagctcaagtgaagccagactgcctggtttgcactccagttctgctgtgcaccagcttgggcaagttacttcacatctttgtgttaaatattctagcacatgaatggagaagaatgtttctagttctttccatttgggaggcacagattgtttgtaaggtcatatctatggttaaaccaggcatctttttaggccacagatgtatacctttgaagtcagaataaattctacacctctttcaggaaaaaaattttcaagggatttgtggccaatatatgaagtaaatgacctgcagattaaaaactcctgttctatactacttgagtgtctagctctttttcttatttgcaaatatctatcacaattaattttatatttttgttttccctgatccatagataacttagtacaaaatataatcgtaacagttcatgtattaataaattgaatatactttatgtgccaatatacctaagggctttacatgtatcaatttagtcattctaacaaacctacaggtgagtgctatcattccctccattttacagatgaggaaactgagatgcagagaattacatttctctagaacacagatattaaggtccccacatggcctaggaggtgcttgagtaaaaaaagaaaagcataccgccttttatggtccaggtagatatatggcctaaaacaaatcatgctggcaaatctcaagccaaacttgatcattataacaaagtggaaagtgcatttccgagaaaaaacaaacaagtagttaacagaagaaagaaatctcccctcaccttgaacatggcttttacatccacaatagccatgcttccctgctcctcagggcacctctggaaaaacacagactggagaaggagaatggaattaggagaaaccagttttgtgtcaatataaactgaggcctgttctccaggtcctctgcctgtgtacacagatagaagtcagagagagaccagcatcttttacttatctttgtgtcaaaaagaaaagtcaggatggaagctacctggagctgccacttctcagcggtctcagatacctaactgagatagtccaggcatggtagggcttctaggaagtgtaattttctccacagagcttccagaaggattcatgacaagggaattccgatttctggtgactctcaggtgtctccccttcttttttttttttttttgagatggagtcttgctctgtcacccaggctggagtgcaatgcacaatctcggctcactgcaacctctgcctcctgggttcaagtgattcttctgcctcagcctccccagtagctgggattacaggcacctgccaccacacccggctgttttttgtattttggtagagatagggtttcaccatgttggctagcctggtcttgaactcctgacctcaggtgatccacccgcctcagcctcccaaagtgctggaattacaggcgtgagccactgctcccagcgttctccccgaatctcctccagctctaaaattctagcccaagaccagagctgtgggtcagggttaatcaatcactattagctgtttactttcaccctgtagatcaatgatctggagagtctcccctaccccacagcatcaccctacccaatattaatctatcccccaaccctaaccacaccccacacacccatatctcatcccatgccccccacccctacagagacagtaatctcagggtgccactgaccgtagagagcttccgacattaccctaagaggtttctctctggatttgtccacctcatagaaataaaaaggaggactggatctccctgctgatttctttttttttttttttttttttttttttgagagacggagtctcgctctcgcccaggctggagtgcagtggcgcgatcttggctcactgcaagccccgcctcctgggttcacgccattctcccgcctcagcctcccgagtagctgggactacaggcacccgctaccatgcccggctaatttttttgtatttttagtagagacggggtttcaccatgttagccaggatggtctcgatctcctgacctcgtgatccacccgcctcggcctcccaaagtgctgggattacaggcgtgaaccaccgcgcccggcctgatttcaggtcctacggcctctgtaaactataaactcatgcacatagcacataacaactctatccaaactcctatggtaagagacttgcccaaattctagaatagcttccagcattttaagaccatgttcctaggctgaccccagtcccccttaaaatgcctgcctgacaacagacgcttgaaggcagcatgctcgttaagagtcatcaccactccctaatcttaagtacccagggacacaaacactgcggaaggccgcagggtcctctgcctaggaaaaccagagacctttgttcacttgtttatctgctgaccttccctccactattgtcctatgaccctgccaaatccccctctgcgagaaacacccaagaatgatcaataaaaaaaaaaaaaaaaaaaatgcctgcctgacaaagtttaatgctgcctggagaatttactatttgttccagctaaaaacctagtggtaggcagacaggcccctaaactcccttttaaaagtaactgtttttggccaggcgcggtggctcacacctgtaatcccagcactttgggaggctgaggtgggtggatcacttaaagccaggagttaatgaccaggctggccaacatggtgaaacaccatctctactaaaaatacaaaaattagccaggggtggtggcgtgcacctgcagtcccagctactctggaggctgaggaaggagaatcgcttgaatccaggaggccaaggttgcagtgagccaagattgtgcctctgcactccagtctggttgacagggcgaggctctgtctaaaaaaaaaactaactgcttaaagagggagttcaggggcctgtctggctaccgctaggaaagcttatcattataaatgctttctctgccctttgagatgtatacctaccatgtgccactcagaactatttcctcaaggacctgagatgcaaacattcagggacataactcccagcccctctggaagagtaaaggcctaactttggtgggtgcagtgctccaagctgcaccacttggccttctgtaataaaagatttgagaactttgcttgatacttaattatgaaaaaataaaattaaaaattaaaaagatctgagaactggctggtgtggtagctcatgcctacaatcccaacactttagggaagccgaggtgggagaatcgtttgagctcagtagtttgagaccagcctgggcaatatagtgagatcgatcgcctctacaaaaattttttttttaattaccagtttagtcacacttacctgtagtcctagctactagggggctgacctgggagtatcgcttgagcccagggtgtcgaggctacaggaaaccacaatcgcaccatggcactccagcctagacaacacagtgagaccctgtcttaaaaaaagaaaaaaaaaaagaggccgggcgcggtggctcacgcctgtaatcccagcactttggaaggccaaggcaggcggatcacaaggtcaggagattgagaccacagctaaaccccgtctctactaaaaatacaaaaaattagctgggcacggtggcgggcacctgtagtcccagctactcaggaggctgaggcaggagaatggcgtgaacccgggaggcggagcttgcagtgagcggagattgtgccactgcactccagcctgggtgacagagcaagactctgtctcaaaaaaaaaaaaaaaagaaaaaagaaaagaaaaaactctgtttctttgtttcttctccagaaaaatggcaattagcaaactaggtacatggaccaaactcccctttgcacccttcagtggcttttccctagcacacccccgcctttaaaaagtctccctttggctgggcacagtggctcacgcctgtaatccccgcactttgggaggccaaggcgggcgaattacctgatgtcaggagtttgagatcagcccggccaacacggtgaatcccagtctctactaaaaatacaaaaattagccaggtgtagtgttgtacacctgtaagcccacctactcgggaggctgaggcaggagaatcgcttggacccaggaggcagaggttgcagtgagccgagatcatgccactgcactccagtccagttcagttcacttccccattgcagcagctattacaggttgagtttcccttaaccaaaaggcctggaatcagaagtggaatctgaagatttcagactttttcagattttgagatatttgcattatatagcagttaatcctccctaatccaaaactccaaaatctgaaatgctccaataaactttcctttgagcatcatgtcagtgcacatcaagttctggattttagagcattttggatttcagattttttacattaagaatgcttaatctgtactgaataaaatctcttctcagctgggtgcggtggctcacccctgtaatcccaacactgggacgctgaggcgggtggatcacctgaggtcaggagttcgagaccagcctggtcaatatggcaaaaccccatctctactaaaagtacaaaaattacgtgggcgtggtggcgagcgcctataatctcagcttctcagaagactgtggcaggagaatctattaaacctgggaggtggaggctgtagtgagctgagatcgtgccactgtactccagcttgggcaacagagcgagactctgtctcaaataaaataaaataaaataaaataaaatttcactgctttagtgtctgtttatctttgaatcatataaacagaatcatatactatgtagtattttgcatctagcttctttcacttagaatttttaaggttcatccatgttgtaacatgcacaattgctaagtaatattctttattaatatttttaatgtttttagagacagggtctcactctgtcacccaagttggagtgcagtgagctgggactacatatgcatgccactgcacatggctaaaaattttttttttttaattattttctatagagacaggctctcaccatgttgcccaggctggtctcaaactcctgggctcaagcgatcctcccacctcggcctcccaaagtgctaggattacatgcgtgagccaccgcatccgtccaaatattttctttcattacatcttttagttggctttaaaaaatatataaataaagactacaaatttccagatcctaattttgtactcaatttctttataattttatcattgggccaggtgagatggctcatgcctgtaatcccagcactttgggaagctgaggcagacggatcacgaggtcaggagttcgagaccagcctggccagtatggtgaaaccccgtctctactaaaaatacaaaaaattagccgggtgtggtggcacgcacctgtagtcccagctattcaggaggctgaggcagaagaatcgcttgaacccacgaggctgcagtgaaccgacctcatgccactgcactccagcctgggcaacagagggagactccgcctcaaaaaaaattaataataaatttatcatttaaatttacgtgcagtcaatgttttgaaatacttggaggatctttgagagaagcataggcttctttacatcccaaagacattgtggcctggggaaactggaacaaattagccgaatgaatctggtactaggctcactgaggaatggtgaagccttaaaaggctccaggacttctctgaacgaaggtttgcttttcagaaagtggagttatagcgccttacctggaatcttgaaccccaaattatgatctctccacggtagtcaacggagcttcataaattattccttaatccgaggcttctcaaatctgttgtgttccctaaacaacagaataaatgcctactctgagggtctgacacaaaagcaggagtcccacaaaataagttcctttaaaatatttcttcttgtatttaaaagtcacactgatttggtattctatacaataataaatttatcttttacacagaaatcctgttttatagtatttatcagatcaattatttagccttttccaaattttcgagtaaactgacgtcctggaagaagcacccttattttcaccattttacagtcgaagaagggaagataagaggcggtgaatccgagactttcattcaggtgacgatccctcgcgggcactcactctcgctcacactacaatcagatcctccatgcggctttcatatactctgtcacactcgcagccagaatcccctcggatggactcttgcaaacctccagccccatcccgggatccgtgcgtcttctacagccaccacttgggccagcgtccaggacgcccaagcgtaacctccccactctaaaccgttaggaatcagtggctggactcaccgcgtcataaaagcataaactgtgacccgatgagtccgcgcactcggaaaacaagagaacgctcccacgtctccgggcgcagcttgtgccagcgactactaggtcagggggcgcagctgagagaattcaagcaacctccccgcaaccggttccgccgcgtttgtgggctggtagcccggaatacatttcccagaggccttcgcggccgacgtgcttcgcgcaggaacgcagccgcctcccgactggaggacgcggtagcggagctgctcaaagcgaggtgctcagccctgggaggctcagggctgcccgaggggcttagtcccagagccagtgctgtcaggggctgagcatgtgaatagggcagtcggaagaccatgtgtgtctgtggcttttaaatacaccccgaacgtctatctcttttaactggagtatttaatttatttacatttaatatagccactgatagatttaaagctgccattttattatattttcttttttttttttagtgctaaatacacaggcttttattttcttcatattcaatctttttgtgaatttaaagatgaggaggccgggggcaatggctcacgcctgtaatcctagcactttgggaggccgaggcaggcggattgcccgagctcaggagttcgagaccagcctgggcaacatggtgaaaccccgtctttactaaaatacaaaaaattagctgggcatggcggcgtgcgcctgtagtcccagctactcgggaggctgaggcaggagaatcgcttgaacccgggaggcggaggttgtggtgagccgagatcgcaccactgcactcgccggggcgacagagtgagactctgtctcaaaaccacaacaacaacaacaacaacaaaaactatattaatactttaataccctaaagataatgagacaaacgtgcatttgtggaactgcatgtcaatcaggccagttccctgcagagggaactcccagcatgacctcagtcatctgtgaggacacagagcagtccttgtttagacacacactttcatctactgctgcagcatggtcagcactccacttcttgatggtttccttctgctatgaatatgcatgtccagttgcttcttagagcagacaccttcctcatccaccagccattggaggaggactggggccacccagatgattgattggacccattcttccaggagggtttcccggtggccctcttccatcgtcatcgtatctgaaatcagatgagtttccatagcttcttctttttttcaaatcttgccgaagcagagttttgaaaaacaaaaccacaaactcagctattccccagaagaaatctgttatcaaagataatctccatggagactgactccagttgtccaacacttgtgcgtttgagatgtaaaccatcttgcccccattccctgcttcggagccttatttattactttttaaaaacagggtctccctatgttgcccaggctggccttgaactcctgggttcaaacgatcctcccgcctctgcctcccaaagtgctgggattacaggcattagctcctggcattttaatttgttttctttttgttgcatgtttcctttttctctcctttctttatgttggattgatgtattactattccaattttctctttaatagtttgtaggttctttaagtcattactccaggaattttaataagtccaaatttatcaatactctgactctcctctcacagaatgcattcaatttcatatgccctcttaaatttaaaatacaagatatcagttacatattcgttttgtttaaaaaaacctctctaggctgggcgtggtggctcacgtctgtaatctcagtactttgggaggccgaggtgggccgatcacaaggtcaggagatcaagacaatcctggccaacatggtgaaactaaaatacaaaaattagctgggtgtggtggcgcgtgcctccacacccagctaataccagtagaataccagctacacaggaggctgaggcaggagaattgcttgaaccagggagtcagaggttgtggtgagctgagattgtgccactgcgttccagcctggtgacagagcgagactccgtctcaacaaacaaacaaaaatctctctgatgttatactattattttgtcagtattcatttacatttactcagaacattaacataaatataagtggtgttcaaataaacagaatgtttaggttttgtcaaagagaaatacagtggggctgggcgcagtggctcatgcctgtaatccagtgctttgggaggttaaggcagctggattgcttgaggccaaaagtttaagagcagcctgggcaaaatagtgagaccccatgcctacaaatttttttttttttaattagctgggcctggtggtctacacccataatcccagctactctggaggctgaggccagaggatcacttgagcccaagagctatggatggcatgactacactgcagcctaggccacagacctagaccctgtcttaagaaacaaaaaggccagatgcagtggctaacacctgtaatcccagcactttgggaggccaaggtgggcagatcgcctgaggtcagcagttcaagaccagactagccaacatggtgaaaccccgtgtctactaaaaatacaaaaattagccaggcgtggtggtgtgcacctgtaatcccagctactcaggaggctaaggcaggagaatggcttgaacctgggaggcggaggttgcaatgagccgagattgcaccattgcactccaccctgggtgacaagagcgagactccgtctcaaagaaaagaaaagagtccaagcgtggtggcgtacgcctgtaatcacagcactttgggaggccgaggtgggtggattgcctgaggttatgagttcaagcctggccaacatagtgaaagcccatctctactaaaaatataaaaattagcggggtgtggtggcacatgcctgtaatcccagctacttgggaggctgaggcaggagcatcacttgaacccaggaggcagaggttgcagtgagccgagatcatggccactgtactccagcctgggccacagagccagactgcatctcaaaaaaacaaaaacaaaaaaaaaaaaagaaaagaaaaagaaacaaagtgagacaatagtaaaaggcagtaaagacagattttattcagtaataactactgcattagggaacagaatccagtgtgaactgagctccactttgggaaacaaaaatcaggagttgttgaaaatgttggggtgtactaaagaagacactgaaaggtgttacgggggagtttggtccatatgactaaggcatcaggtttttttttttttttttttttaactaattggtatttatccagagtagaaacaaacttcttgtatctttacgactgaggtagttgtgaaagttggagcaagacagccaccaaagttaggcccttacactcccacagcaactgagaggctggagcaagagctggctctctgaatgtttgcatttcaaactcagctgaggagacagctcttggtggtagatttgcatctcaaaggggcagagaaatggtttataattgcaagctttctaaagtaactgctttaagagggggcttaaggacctatcactatttacaggttttggctggaacagtatgttttcagaacagcattgagctttctcaggcaggtttttttttttttgagatggagtcttgctctgtcacccaggctggagtgcagtggtgtgatctccgcgcaccgcaattgccacctcccgggttcaaacaattctcctgcctcagcctcccgagtagctgggattacaggcgcctgccaccacgcccagttaatttttgcatttttagtagagacggggtttcaccatgttggccagtctggtcttgaactcctgacctccagtgatccacccactttggcctcccaaagtgttgggattacaggcgtgagccacactgcccagcttacatctgaatttcattccaggattaagtgtctgattcacctaaacagatcggaatgaaagccctcttatggtttttacttattatctgtttacccagaatgaattcaaatttaaaaagcataaaacttttttgaattcattaaacttgaatggttaatggttttcatttcgtcaaaatgcactaaaaataacacaagtaatgatattattatatacagaagctaatgtttattgaacgtaacagtatatttcatgtagtttcccataattttttcatgtactaactcatgtaattctttgttttttagagatctgaagtgattttacctttacttccttcactttaagccaatcatgaaatttcagtgatttctggggtgagggcgaaaggtggtgttacgaatcatcggggctgtggcccagttgcctcacggaggtgcaggtaggctggggcctcactagggcagctggaggagcacggactgccctgccggcaggcaggtgatgttccgagagcatgagagctggtatgcaatgtcttctgcagcttccagcttgcacagctcgctctggccgtcccctgcagtggccagtgagttggcgatcagctcagctgccttggagtcaccctcagcagagatgatggccgccttttccaccacaaatctggcgctctctgcttcctggggggccacctgtctgttaactccttcaagaaggtcagatgtgtcaaagacacgtcgtccagaatgagcccaaaggtggctgctcactccataaggttgttgctcacctggctggagaccagctccctctgggtgattagttctccagcatcaaagcgagccaccagtgacttgaggatctccgtggtaatgaacggcagcacacactcatcgtagtcctctccaatgctggtgaagatgcgaggaagctggctagtgatgggccggaagaggatgcacagtgtgatgttgacattctgtaaatctttgctaccagtgatgactggcgcactacgtggttgagaacagcagtcaaagataattggtttttgtacacatgggatgagaaagtgagtcccttcccctaccacaatgttctgtactccacggaattggtcaaagatggcagctctgtgcccagcatccacattacataaggcagagttcaccatgcctcctgcaacagctaaggccaggccaaacttgccgatggactcaaacactttggcagccatgttttcttctgcgggaccctctcacacctgcttccactctgacctccacatctaactcatgtaattctaacagcactatactgtaggtactactatcatcatttatatatgatccccagaagggataaatatcttcccccatatcatcccagctataggaagcagatgttgatcatgagcattaaatatgcagagtggctaaatagcctttcccatcatcgcttatatcaacagaggtttcctgtgtaatggctttttccaggtttaacaataaatgattgttgctggaagatgtttacatgcaagtataaagaatggtttcctacgttttctcagttttcctctactgtgaatattttggcaatccaaaactagaggaatatcagaaaagttttcttatgttattaaaaaaatacattataaattctctgaatctgagttaacacaggtcataccaaagaaactgcatatatgatttacattttgaaaagttcacaccaatacaaattgatgcctaataaaaactgaactgtatctcaaagccattccacattgtcttcattcaaattgttcagtgggataaatccattgacacaatgtgctttctttactacctgtatatgccacaatttctctatcaaatatgaattctctgatgtacttcaaggatggatctaagcctaaaggaccttctgcatttgttacatttaaagggtttctcaccagtatgaactctatgatgtatactaagttcatggctactattaaaagctttcccacactcttcacacatatagggatttccatcagcatgaacgctttcatgtctaacaagatatgaggcacagtgaaatgccttcccacatcttttacattcatagggtttatcactggtatgaattctctcatgaataataagatgtgaagcatgactaaaagtttccccacattctttacattcataggacttttcaccagcatgagttcggtcatgatatatgaggcttgtggcatgacgaaaggccttgccacattccttacattcgtagggtttctcagcgctatgaatattctgatgggctttaagtacagaaatgaacctaaaagacttcccgcatttgttgcattcaaagggtttcttaccactgtgaatactcagatgctgagtaagttgtccagatacactaaaggccttcccacattccttacattcataaggtttctcaccagtatgaactctgcgatgtatagtgagtttatggctataactaaaacccttcccacactcttgacatacatagggtttctctcctgtatgaattctctcatgtataacaagatatgaggcacaacgaaaggacttcccacattctttacattcaaagggtttgtaaccagtatgaattctgttatgatgggcaaggtgtgcacgctgactgaaggccttcccacattccttacatttgtagggtttctcaccggtatgaatattttgatgtattttaagggatgaattgagcctaaaggacttcccacatttgttacattcatagggtttcttaccactatgaataccctgatgtcgagtaagtcgtccatgcacactaaaggctttcccacattcctcacacttataaggtttctcaacactttcaaatgtatgaggtgcagtaagttgatggccactactaaaagcctccccattttctttacattcatagtgtttctcccctgaataaattctctgatgcatggtaagttgatacctacatgtaaagcccttcccgcattccttgcattcatagggtttttctccagtatgaattcttttatgacccacaaggtgggaaaactgacgaaaggcctttccacattccttacattcatgtggcttctctccagtatgaatactctgatgtactttaaggcctgctttgagcctaaaggacttcccacatttgttacattcaaagggcttctcaccagtgtgaatactctgatgtcgactaagtcgtccatacacactaaaggccttgccacattccttacattcgtagggtttctcaccataatgaaatctatgatgtacagtaagttgacggctagtcctaaaagcttccccacactctttacattcatagggtttctcaacatgaactttcccatgttgagcaaggtttgcaggataactgaagaccttcccacattcttcacattcataaggtttctcacgagcattaattttctgatgctttctaaggtctgtaagatggctaaatgccttcctaaacttttcacattgatcaggttcctcactagtatgaattgtttgatgtaccatgagttctgtaagatgactaaaggacttctgacattgcttacactcatatggtttctgtccattatgaattctctgatggagagtaacacatgagtgtttcctataaagctgcattttcccatcgctgattatttcacatcttgaatccaaatctagaagacataaaataaaaacattttattggatgagaaaatgtcaatgttattgtagaattaagagaaattctcacctattacagatgctaactcgaaaatacagttataaaatataaaaaatgaaaggagagctaaaaaaatgagtttgtgcagtggaatgcagccttacacacacaggcacacatacacaaagagacacacacacacacagagccctgttttgtagtgtttgccaagatctctggtgtaaatactcccactgagggcaatttctagctgtcaatttaatgcagatttattaatatatgtgcataactggctctagaatgacagaactgaccagctgtaccacaccccctgtatataaatttatatcatatgctaagaatacaggcaagtatcgatatggaaatagaagagtaaaatggaagaattccagcagattgaacatctgtaggaccagaagtaataagaaaatgtcagggtaagataactaaatagaaactcagtatcttatttaatatatagagaaaagtaggatacacggtcatgcatagaaaggaataaactacagtttcgggaacacccatatttcagggaagattttcattgaagaatgatcaggtttacagcatatgtcgatgtgatatacatggaaattataacataaagggtaaggaaatcatgacggagaaaatgggtacacatcataatcatgggcattcagtatcggcaggcagggagttcagagtgaatatttatctcaataaaaaggaaagaaaataagtaaaagatcactacccaacatttaggaatttaagagcaaggtacaggaaagcaggaaaataaagataaaagcagaatgtgatgggttaggaaacggaatagtgtcaacacctaaatcaaagacatggtgtttacaaaaatcatcgggtgaaatatgagctaaagcaaccaaaaaagaataaaaaataaaaataagaaacaagggaaaataagaaagagattttatttaaattatgagagtatatatacatattttgaaagtattaaaaacagtgaatgattttgtaggaatattcttcaaagatgaccctaaaagtgaaaagtctaaatagtcaattgtcatagatgaaatacaaaaagctgctaaaaagacagttaatatgagcacattttaccccctatcttgtaatttctcaatatctgaatttttaaaatgtgcacataagatattccagagaaacaattcaggaagggaacaggtaacatgaacctgaaaatataattaaaaaaagaaaggaagtcttcaaagacttagagttgtgagtaaacaaaacaataaaaatagtagtgttgaatatgaattctaaatttctcttcaaagaattaatctatcagtatgttcaatctttgccttctacatttaaacttaacttcctctaaagcaacctttttcgattacctactccaccctaaatcattctgatcacctgctccaccctaactcattccagttacctactacctgctctgccctgactcccgccaaagcgctcaccctgtcattctctttaaattagccaatcagaattagtttagcctgtgcggtctaaccctagccaataggggaacgacacagcagcaggggacacgtgcgtcagggataagaaccccttcccctcccttgtccaaatgtgtgcccaccattgctccatcggtgaaagcgcacacttctatacaagtaccttaccttgctgaaaatttaaaaaaaagaaaattttatattcgagtgctatttcttttgcagcatcgaaactttatttataacagtagcatacccaggtttggagccaggctcaatggctaatgcctgtcatgctagctaatatgattgcaacatcagaacattaagacaaagcttagaaaaacacactggaaatgatggacaacataggagatataaccatgggggggagacagaaaaggatgaaaatgcaaattatacaactgaaacatataatcactaagagtcagtaaacttgattgatcaatagaaattattcaacttgaaatggagagagaaaaatggtttaaaaaattttagctgggtgtgatggctcatgcctgtaatcccagcactttgggaggctgaggcgggtggatcacctgatgtcaggagttcgagaccagcctggccaacatagtgaaatcctgtctctattaaaaatacaaaaaattagctgggcatggtggcgggcacctgtaatcccagctactcgggaggctgaggcaaggaaatcacttgaacctgggaggcagaggttgcagtgagcagagattgcgccattgcactccagcctgggcaacaacagcgaaactccatctcaaaaaaaaaaaaaaaaaaaaaagaaagaagaaaaaatgtgtaaacagctgtgggaataaatcaaaagatatgattgaaattataaactaaaaaacaaagattttggcaggaaaaatatctcaggaaatagcaattgaaaacatctcaaatttagtgaaagaaataaatttgtagaattaagatgctcatttaatgccaagtaagatatgttacatttactgataaaagcaaattagtttgttgccatcagacttactatacaaaaaatgctaacaagttatttaggcccaaagaaaatactatcagagaaatctgaatcttcagaatataagaaaagcatcacaaaagatgatgtaaataaaataattttttgctccttaagttctttaatatgactgttaaaagcaaaactaataacactgcctagtgaggtttacaacatatgaagatgtgatatacatggaaattataacatgaagggtaaaggtggatataaacctataaaaatacaaggtttatacatttgttgagaaagaacaattctatctagctggcgaaacgtcatgtatattgtatactataatacctataacactacctaaaataaattactcaaggagatacaacccaaaagtcaacaggtaaatttatttatttatttttatttttactttttttttttgagatggagtttcgctcttgttgcccaggttggagtgcaatggtgtgatctcggctcactgcaacctccgcctcccaggttcaagcaattctcctgcctcagcctcccgagtagctggaattacaggaatgcatcaccatgcctggctaattttgtatttttagtagagacggggtttctccatgttgaggctggtctcgaactcctgacctcaggtgatccgcccgccttggcctcccagagtgatgagattacaggcgtgagctaccacaccccaccaacaggtaaatttaaataaatagcaaaaaaaaaaaaaattgaaataatcaaaattacaaaaggaatggacagagaaactaaatagagaaaaaaagtaaagtagtagacctaaatgtaatcatgttaataattacataaaatgtttagggtcaaaacactttaattaaaaggcaaagattaacatagtgaatgacccatcacctcacacccatcaggatggctactggtaaaaacaaaaacaaaaacaaaacagaaaataactaatgttgaagaggatgcagagaaattggaacccttatgcactatgtaatggctacaaggaacatactttaaagacacaaaatattaaaagtaaaaagatggaatcaatataacaaaccaaaaaaatggtgggctatattaatatcagacaacatagatttcaggacaaagaaaaacaggaggactcaagaaggtgcatgtcgtaacataaaagggatcagtctatcaagaaaacataaaaatcccaaacacttatgcacctgataacagactctcaaagtacataaaacaacaactgattgaaatgcaatgaaaaatacgtaagttaaaacataactggaaattggccaggcgtggtggctcacacctgtaatcccaacactttgggaggccgaggtgggcagatcatgaggtcaggagatcgagactagcctggccaacatagtgaaaccctgtctctaataaaaatacaaaaattagctgggtgtggtggtatgcatctgtagtcccagctactcagaggctgaagcaggagaatcacttgaaccccggaggcggaggttgcagtgggccaagaccacgccattgcactccagcctgggtgacagagtaagactccgtctgaaaaaaaaaacaaaaataaagaaaaaaaatatataactggaaatggaaatatttttctagaaacaattcccagaacaagtacacaaaaacacggtaaaaatatacaagatttgcacagtattaaccaagaaactacatgagatattcacagaacattccacccaacaccaacatatacaatattctcaagcccatgtggaatatttgccaagagggcccacacagtacataaaacaaatctcaattattatttaaaacaattcaagtcataaaaagcatgttctctgatcataatggcactaattataaatcactaaccaacactgaaacatccttaactgtttagaaaacaaaccaacatacttctaaataaaccataggtcaaagaagaaatcaagaaggaaattagaaagcaatctgaactgaatcaaaatggacacacaatgtatcaacttttatggaatactaactaataaagaattacctaggggaaatttacaacactaacatctatgttagcataaataacaacaaaaaaagacctcagttggctgggtgcagtggctcacgcctataatcccagcaccgggcgagcgggcggatcacaaggtcaggagatagagaccatcctggctaacacggtgaaacctcgtctctactaaaaatacaaaaaattagtcgggcatggtggcgggcgcctgtagctattcaagaggctgaggcaggagaatggcgtgaacccaggaggtggagcttgcagtgagccgagattgcgccactgcactccagcctgggcaacagagcgagactctgtctaaaaaacaaacaaacaaacaaacaaaacaaaacaaaactcagtcttcgccttaacagaaaaagaggagcaaatcaaacccaaagcaagaagaataaaaataataatcatcagaaaaaataataaaatagaaaactgaaaatcaatagagaaaaaaatcaatgaaaccaaaagccgattatttgaaagatcaatgaaattgataaacctccacccaaaggggagaaaagggaaagaaggcataaatgacccatttcaggaataaaaaagggattatcactataaatcataaagtattatgaacaaccccatgccaatcaatttgacaacttagatgaaatgaacaaattccttgaaagaagcagaccaccaaagcttgaccaagaagtagataaagcaatgaacactaccatccagtaaataatttaagctggtcgggcccttcagaaaacagtttgccagggccgggcatggtggctcacgccccagcactttgggaggctaaggcaggcagatcatctgaggtcaggcgtttgaaaccagcctggtcaacatggtgagaccctgtctctactaaaaatacaaaagttagccaggcatcatggtgggcgcttatagtctcagccgcttaggaggctgaggcaggagaatcacttgaacttgggaggtggaggttgcagtgagctgaaatcgcaccactgcactccagcctgggcaagaaagcaagactctctctccaaaaaaaaaaaaaaaaaaaaacttagatgcatgttcaacttccaagaaaaatacaaagcaccaatttttacttaagaagaaattgaaaatctgaaaaagaaaaaaaactatatttctttctcttcctttctctctctcccccacccctgctcccttctctctctttctctctcttttgttctcataaagtgattaaatcaataacccaaacacttcctataaaaacaggttgatgccaggcatggtggcttacatctgtaatcccagcactttggggggccgaggtgggcggatcacccgaggtcaggaatttgacaccagcctggccaacatggtgaaaccctgtctctactaaaaatacaaaaattagctgggcagcacacccatagttccagctgctcgagaggcggaggcaggagaattgcttgaacccaggaggtggaggttgcagtgagccaaaatgccgccacttttctccagcctgggcaacagagcaagactctatctcgaaagatggaaaagagaggagaagagaggagaaaggagaggagaaaggagaagaaaaaggagaggaaaaaggaaaggaaaggaaaggagggggaagggggaagggggaagggaaaaacaaaagaaaagaaagaagaaagaaatagctggacatgatgtgtcctgtaataggaactgaggtgaatacaccttcagtgcaaagtttgaggttcgtctgcgtaggagttaggccgtgttcattgtgtgctgtagctgtgtttgtgttgcagcttcaattcttccagtctttatttatgtcttctctttgggtttccctagcaattctttcttaaatggagactgtcttgcaggtctctcagttggaatccacaatttttactctgtagctctgctgaggaggaggtaaggtatttcagaggggacgctttctgtaatcttacgattagcactctcttccccaccgtggccagacggctcgcgttgtaacttgacaagaatttcttaatttttttttttgagacagggtcccactctgtcacccaggttggagtgcggtattgtgatctcagctcactgcaacctctacttccaaggctcaagtgatcctcccaccttagcctcccaagtaactgggattataggcagtgccaccacacctagctaatttttcatatttaggttggagtgtggtgttgtgatctcagctcactgcaacctctgcctccaaggctcaagtgatcctcccaccttagcctcccaagtaactgggattataggcagtgccaccacacctagctaatttttcatattttttgtagagatggggtttcgccatgttggccagggtggtcttgacctcctgtcttcaagtgatctgcccgcctcggcctaccaaagtgctgggattacaggtgtgagccactgagcccggccaaaattcacttttcttgatatacagttctatgagatttggaaaatgcatatggttgttcataaccacaatgtggatatagaacaggccgggtgagatggctcacacttgtaatcttggcacgttgggaggctgagacgggtggatcgcttgagcccagaagttcaagaccagcctgggcaacatagtgagaccctgtctctacaaaaatacaaaaattagctgggtgtggtggtgcacacctgtggtcccagatacttcagaggataagactgtgccactgcactcctgctctgggtgacagagtgagaccttatctcaaaaacaaaaaaaaggttgggcagggggatatagaacaattctgggccaggcacggtggtttacacctataatcccagcactttgggagtctgaggcaggaggaacacttgagcccaggagtttgacaacagcccgggcaatgtagggagacctcatctctaaagaaaaaaaaattagccaggtgtggtggtatgcacttgtggtcccagctactgtggtggatcacctcaggtgatctgcccgcctcggcctcccaaagcgctgggattacaagcgtgagccacagcgctgggccttcattggctatttcatgctgagatatccatttcttctccacatcagaagcctcctcgctgagaagggaaatttatgaccaatgtttcaaggatgcgtttaccaaatgagatgaccacttccacgagggctatttgcatacaaaaatggctgcccctgcctgacttgctcttacctgtacactctcctcttgtttcttccctcacaatcatccatggctcttttccttgctccaataaggtgattaaatctggcttagatacggaatgtcctgcttacaaagaaaagaagtgccacaaaatacggaaatcaactttgaaggtaaaatttaaaattacaattgcaataaatgaaaggtcaaagtgatactgagtaagattttagagaagagtgagggaaataaagaaaaagatcacccagggagagtcaatgtttttgtttgctggttttcaaaaaaaattttttttttttttttgcgacggagtctcgctctgtcacccaggctggagtgcaacggcgccatctcggcacaccacaacctccgcctcccaggttaaagtgattctcctgcctcagtctcctgagtagctgggattataggcgtgcaccaccatgcctggctaatttttgtatttttagtagaaatggggtttcgccatgttggccaggctggtctcgaactcctgaccttgtgatccgctcatctgggcctcccaaagcactgggattacaggcatgagccaccgtgcccagtctcaaaagaaatttaaacttatatgtcctctaactgtagaaagcaagcataaagtggttgaaaacacatactctaaagcctgggattggctgggtgcggtggctcatgccttgtaaccccagcactttgggaggccctgaggtcaggagttggagaccagcctggccaatatggtgaaaccctgtctctactaaaaatataaaaattatctgtaggtgtggtggtagtgcctctaatcccagctactaaggagggtgaggcaggagaatcactttaacccgggaggcggaggttgcagtgagctaagatcgcaccacagcactccagcctgggtgacagaagactctgtctcaaaaaaaaaaaaaaaaaagcctgggatcaattcctgactctgtcaccttccagctgtgtgtgaccttgggcaagttacttacactgctggtcagtattctcacttataaaattgggaaaacaataaagctgttgggagtattaaattacttgatatatgagtaaagtaattagaaaaatgttggtgtggaaatcacaatgctagctgttcacattacactgctgcaattattttactaagactatacaagaagagatatctatagtatattcatcccattttacatgtgattttcatggattataagcttcaaccataaatcaaatgaattctgtctcaggaaatggactactttcttctcaattttaagtaagtttcatttatccagtccaccactctatgcctatatgaacagtctctttcaataataacggcaattcagcaccctctttcaaagtaatatcactgcaaatggatcagataataaaatggagcactatagcaattctgtgcacaaaataaataagaaacctgaacgccctgacaatggttctacaatgaacaccagaaaattccaagctaaaccactggttcaacccacttactgggttaaagagacaaataaaagaggtatcagagggaggtgtgaatgtcactgaaagatagagaagatgaaagtgttgaaaggacctgccattactgactcaaagctgaaaccacctcaatagaaatagagaaaataaatttagtttcttaaaaggcagccctgaaaaccacaacagaaaaagaatgtatcctacgaaacagatgattctaaattattctaaatcattccaggttgataaacatacccaatgagactaagttgtcatagttctccatcatcacctcctggtacaaggtcttctgaaccaggctgagatattcccactcctgatgagagaagtctatggccacatccccgaatgttattgatccctgaaacagcaaacccatgtattactggggaaattccaaaatggagtggaggggccgggcactgtggctcacgcctgtaatcccagcactttgggaggccgaggcgggcagatcatgaggtcaagagatgaagaccatcatggtcaacatggtgaaaccccgtctctactaaaatacaaaaaattagctgggtgtggtggcgcatgcctgcactcccagctactcgggaggctgagataggggaatcacttaaacttgggaggcgcaggttgcagtgagccgagattgcgccactgcactccagcctgggcaatagagcgagactccgtctcaaaaaaattaaaagaaaatggagtggatggccgggcgcggtggctcacgcctgtaattccagaactttgggaggccaaggcgggcagattacctgaggtcgggagttcaagaccagcctgaccaagatggagaaaccctgtctctactaaaaaaaccacaaaattagctggcgtggtggcacatgcctgtaatcccagctactcaggaggctgaggcaggagaatcccttgagcctagaaggcagaggttgcagtgacctgagaatgctccattgcactccagcctgggcaacaagagcgaaactccatctcaaaaaaaaaaaaaaagaaaagaaaaacgaaaatggagtggaggagatgaaggagtgcattgcagcagaagagcaatataaccagcatacagaccagaaatctatgctatcagggaggggaatgaagcagaatttatacatatttttgaagaagcttgaaacacaaataaaactttctgcctgttctgggacacttcttaggtatctgacctttttgaaaatgacaaaataataatgtttttctattaaactaaatcattattatgcacataatgccctggtggtatctgcctcataacttctcaatcaatgtgtgttaactgaggaatattttgacttggaagagaatttaaacttttaatcaagagatgttttatgcaaaatatggtacagattctcaattttagaaaactaggtttcctgtgacctcgtggtgcaacaatagcgcatctgactcacgcatctgactccagaaaactaggtttccttaaaattaataatttcttcaagcatcaagtacttcattacattaaatcttaccatgagcatttttgtttgttttgacaaaggattttatcatgacattattattttatggtatttgtttttcaggactttctatccaaatccacgatttctgtgtttacaagttccaatccaatagactaattcacacaaaacatgagattttaccctacctgaagatttagatccttcaatgccaatttccaccttatctagctgaaaaattcagatgtctggaaaatttcaaagacttcccatggatggtcaaatggaactgttgtctcaatcgcaacaaatgacaaaaccaacctgaaatgcgtattatctgtactcaaagaacttgactcctttcctctgtatcactgcccaaaatagaagaatgggcacctagaggacattaatttggtcaataacaacatgaatgctagtgaatttgcagtggcccacctagcgaggatgctgggtgatgtggtacatattttactggaagaatgagaactggagattaggttaactgagcaccgtctcacgaaggtaacttcaggaaaaatgatgagaagacatacatgacctaaaaaatcacacacaaacctccacatggcgagaaatatcaacttacataggacatggtttgagactggcaagagttgatcagtccttggcgtttctctaccagaagagcaaagtcaaaagaaccaagacctgaaagaagagaagaccttgagaccagctgtgctttagtggtccccataggactcaaggtaatagtactgttttcctcttccattccaagttacaaactacctcctctcacatacaatttgggaagattaagattctggataaacccatttcctcccccactacccaagggcctcacctacacagagtcatacattagaaacatactgtcatggaaaccagacccagataattcagtaggaaattttctggccaatgtacgatgttggtgaggcagatggggacctcagattaggcagccctgtcctgctttgagcagaactacctctttccattccctcctttaagggtaaaaacagggaacatcatccataccagaacctctttttagtcttgaaactggggaaattggtcaagatattggagacagatggcgagtgttcagcattctaagtctagcaaagcttcctagttaaatatataacagactatcactgtcctagaatacaaactagtcattaaatgtgaaattgagaaaaattcaaggacatgaaaaatatcagaaacaatgtcaacataaagatcagactgaccaatacatttatttttgtaaaatatataaatacatatccatcaatacagagagaaaggctggcagacagataatcataaaataggcaaggtggcatgcacctgtagtcccagctacccaggaggctgaggcgagaggatcacttgagcccaggagttcaaggttgcagtgagccatgattgtgctactgaactccagcctgggtgacagagcaagactctgtctccaagaaacaaaaaagtgcttatagtcatagtgcttatatctcactatgtattccattttggctgaatacatgaaacaactaaataaaactaaaggaaaagtaaataaacctttgcttagcaacttcccataatcagagtttgataaatagcattccctatacttttgtgtggctcttgattttttcattattaatacttccttcacgattattgtaagcacggacatattaacttgaaacatgtatgtgtttccaatttgttaaggtgggaatttcaacaaaattattttttctctaaatttaaaatcatcttactgaatggcttatcttctgtgggttcctttgggtccccaaacctaaactcacttcatcaccggttctcagatatgttagaattgtgtctccaacaacatggggaactgtccctgagaaatctcctctgtgaatggatgatggtctcaatacagctttatttcaggtcttcttaacagaagggtttatttcgttcctaaatctggcaggtaggtcaggatatcctctagatagctgctgaatttcctcatgcaattaattttgctttctatctagtatcattacagtgaaaactacaaggtttaaaagatgtagtataaaacctgtttatcaccatacatagcccatagactcagtgtaatttgttcatagcctgactattgctatactcagactgatgtctctgttacgtgacatcaccaagtagttcacctaaatctctccaaacagactctatcacacactgccttaaacttcctcctattcagatttgactttccttcatagactgtaaaagtatttcagaggaagcaactcatcttttcagtgattgtcccatttcaaatactgcaattttcaggtgtggcgtagtagaagcacttaataaaagtctgattttttttttttttttgaggcaaagttttactcttttgcccaggctggagtgcagtggcatgatcttggctcactgcaaactccgccttctggtttcaagtggttctcctgcctcagcctcccaagtagctagctgggattacaggcacctgccaccatacccacctaatttttgtatttttagtagagatggggttatcaccatgttggccaggctggtctcaaactcttgacctcgtgatctgccagcctcagcctcccacagtgctgggattacaggtgtgagccaccacgcccggcccaaaagtcttttttaccacaaaattcacaggtacacttgtaagaatttttaaaaaggaaataacgatagaagtacacaaccaatacgtacaatacattcatcaaagataatttttgattatcgaaattaaaaacacaaatattaaaagcacaatagggagtaggttaaacatattattctccggactatggtaacatcctatgccatgattactaagattgatcttaaatcatataatcaaaggaaaatagtaccaaggatgagttagtaaataagacaggtttaaaaacgtatgcacccagtcgggcgcagtggctcatgcctgtaatcccagcactttgggaggccgaggtgggcggatcacgaggtcaggagatccagaccatcctggctaacacagtgaaaccccgtctctactaaaaatacaaaaaaaattagccaggcgtggtggcgggcgcctgtagtcccagccacttgggaggctgaggcaggagaatggcgtgaacccaggaggcggagcttgcagtgagccaagatcgcgccactgcactccagagcaagactccgtctcaaaacaacaacaacaacaacaacaacaacaacagcagcagcagcagcagcagcagcaacaacaaacatactcaccctgtctccagtaaaaataattttaaaaaaaattagctgggcatggtggcgggtgcctgtaatcccagctacttgggaggctgaggcaccagattcgcttgaaccaggagaccgaggttgcagtgagccaagatcatgccactgcactccagcctggatggcagagtgagaccccatctcaaaaaaaaaaaaaaaaaaaaagtatgcaaaaattagttacgtggtatcctgctgaaattaagaagacaggctgtcttctcactctcaaaagtgatactgagttttgccttatgagagatgctaacatatgaatgcctgtttccccatcagcaaataagggataggaatatatcctacttaacgagacagttctgaagattaatcaagatgatctatagaaacacgaaaaaagtaaaatatgatagctactgtaataacattatcatcaaatgttaaaaaataccacatgctcattaatccgttattataaaaggaacttaattctgttgcttcctgtttttctttctttctttctttttttgaaatggagtcgcgttctgtcgcccaggctggagtgcagtggcacaatcttggctcactgcaacctccacctcccaggttcaagctattctcctgcctcagctctccgagtagctggaactacaggcgtgtgccaccatgcccggctaattttttgtacttttagaagagatgggctttcactatgttgaccaggctggtctagaactcctgacttagtgatctgcccacctcagcctcccaaagtgctgggattacaggcatgagccactgcacccagccactttctgtttcttaaagtttgtgcttcatgggctttctcctactcataattccgaatttacaaatttcatggcccacctttaagaaaatacaagtcttctttaaaaaaaaaaattaggttttttttggctgggtgtggtggctcacgcctgtaatcccagcactacaggaggctgaggcgggcggatcatctgagttcaagaccagcctgaccaacatggtaaaaccccatctctactaaaaatacaaaattagctgggcatggtgatgcatgcctgtaatcccagctactcaggaggctgaggcatgagaattgctgaacccaggaggtggaggttgcagtgagctgagatcatgccattgcactccagcctgggccacagaatgaaactccatctaaaaaaaaaaaaaaagatgatcagataagtaaggagaaaatgcccctttccttactccccagcaggtacagaaaacaaggaagataccactcagcctcacatacattcaaagaactggatctaataaagtgctaggtcaagaatattaaggagagtgaatcttattttcctgccaaatacaaacatttatgtgagtatttgtaaatatcacaatacctatttgttattattactgaactatctttggaaatattaccatacttgcaagacatctggaaatcatagattaccatgcttttctctgcagtaactttgcatttctaaactactaattctgagaggatgtcttcatcatttgtgccctgttaagttttaaatcgcatttttaatacctaaaaggtataaaaacttggattgtttttcacctctgaaggaggtccctggtagctccctctcctcttaaaatgcagagatatatgaaagcccatgtcaaaagacctagttgcaacacattgacttacagatctaatgggctttgtgattcatgaaaggggtagcctccattgtacaaaatagcgtaagagctcctactgagcaatggagaaacagtggattttgtaaggtggaaacaaataagagaactatagaaaaaaaaattgattggtgactatcaggctacttcagtttacttttttctggaaggttaagcggaggtcatttccttattatgctgactcaggtagactggagtctcctgttttcaggaaaaactgatctgtttggaactctacctgctcccttaaagtttcagttttgtaatgtggcttttagcatgagtgacttcattttggtttagtctggtctgttggagcctagtgcagaagctcagtccaaagtaatggtgtctcatcatactggttttatatccatggttgggttagattcctttttctaactaaaagtaggagtctgtctatttcattaattctcttctgtaaagacaaaaccacacacaagtgctcacacatgaaaactgaaaacatatacacccaaatttgtaaagtgattctctctgggcagggaggtttgggttattctaaatttcttctttgaaactatcttagggagtgaaatttttgtgacgaaactgccttaattccatcatcataaatataacttcaagatatttcaaagtagtaataaactatttctaaaagtatccttatggggagagggtacatgtgtcattaaaagaaatctaaatattaggcctagaatgaaaaatcagcgtgactaaaacatgtaactctttgtcttcttgaacagcctttagctgtgtttcttctacataactagaaacaattcactataaagattctttccttagtggacagggaaatggcttctgcacatctaatgggaacaggtacacaaaataggtccaataatttggggcacacattatatgctcagtaaatgtagccacaaccctttcattcctctctgaaaaaccaattaaataatcattttggatacaatccttgcaaaagtttttgcaaaattccctttgtttaattttaattttaaattttatttttttgagacggagtctcgcgctgtcgcccaggctggcgtgcagtggctcgatctcggctcactgcaaggtccgcctcccaggttcacaccattctcctgcctcagtctcccgactagctgggactacaggcgcccaccaccacgcccggctaattttttgtatttttagtagagacggggtttcaccatgttagccaggatggtctcaatctcctgacctcatgatctgcccgcctcggcctcccaaagtgctgggattacaggcggaagccactgtgccaggcccaaaattccatttttaaaaaatgagctgcggctgggcgtggtggctcacgcctgtaatcccaacactttgggaggccaaggtgggtggatcacctgaggttgggagttcaagaccagcctgacccacatggagaaaccccgtctctactaaaaatacaaaaaaaaaaaaaaaatagccaggcatggtggcccatgcttgtaatctcagctactcaggtggctgaggcaggagaatcgcttgaacccgggaggcggaggttgcagtgagcagagatcgcaccattgcactccagcctgggcaacaagagcggaactcagtctcaaaaaaaaaaaaaaaaaaaaaaaagaaagaaaaagagttgcatatatagtttgagaactgtgatccaccactgtaactctaaatagtgttaaacattagatcacagctatttatcctgtgacagattctttacaaacataaatcttattatttgtataatatccaatcccttggacgctgtataattttcttaaccattcccataatctcgttcattagttttctgcaaaaccattcaaaggtataaaactctttgattccagatctaaaacctgagtctaaataatttggattatggacatcctagaaaaatgcaaattaacaaacatgtacaggaattctttatagaatttcagggggtttgtgatgtcccttatgcccataagggcattggtctacagacagtacaccaatgaccgagaattcctattttggaaaacttaaattctggctcacttccttcacatcacggctaagttcatattcttgttgcttttgatctacagaaatccaaaacggaatatccaaaattgcctcataatacttagcgcttatgtttcccccctccaaggctgcaggcgcgtaatttcatacacacgaccagaaggaagtatgttggatggaacctgcaatcatccttcactgcaggttcttggggtcagaattcaaggccgtgtttgttaaacatgtaaatgaaactccaagaaccgggaggtgggggcggagtaacaacccttttcaggagggaatcctacactcgaaactgacaaaccctgccagaccaaattttagtcaggctactacaccttcagctaggcccatctgtacacttcactgtaaaatctggctatagcaaagaactattctaagtcagtttagcaagaccctttcgcctccgtatcttcatcctccaccgtcccccaggtctctctctccagaaataatcctgttaggtgcgtttagtcagaatcttccttaacccagacatttcctcttagtaatttctcatccagtgatccctaaccttcttggctataaattcccacttgttcatgctgaattcggagttgagcccaatgtctgttacccactgcaaaatctcacagccgggatcccaatacctaccaccatggtcctgaataaagggttctttgcatgctttaacaagtgtcactgaatacttttttatttaacagaatctatcatacctttcttaagggcaattactcttctaagcttctcatcctatctgtttcttctcactggaaatcttcatctaagactcagtatctgatttcccattgggaccatttctctgttgtagtcgtactaggctgaggaaggcacaggaagcagcagggaacctggagccaagggtcaatagaccccacagagcccagcgaagcacgctttacaaaggacacacacggcatgtacaggtcacacaaggtcgactacgcacccctcacagtcccgcaactgcacccacgtcacacaggcaagccggtcctgtcgccgctgcgcggtctctcacgctccccgcctgtctcctagagacgggcccctcctccgcagctccagcaccctagggcctgaggaggcgggagactcgcccggcccgcctgggggcctccgcgctctgagcgcctcctgcagccccactctcaccgccacgcagggtaccacgcgggcggcgggctggggctgcagaggctcccgcagtgacctgcgccgccttcttcaggtggaaccaaaaggtcccggaaccggagccaggggtccaagttttctccgttgcctttgtaatatgtagtccaagccagaacagtcaggaccgcaggtaccggtgagaaatggagtccagaatcctaaaaacctacgagaaatacggcagcgaccacttggaccgcgcctcccacccaccgctcgagccccggagacttctgggagtggccgccttgcctcgagtgcgcatgcgcagatcggccactactgggcccctggcctgaggcttagggtggagttagtgcgttcttagggccagtaggaggcgagtctgagtagaaactgatccaggtagcctcggaagggatcacctgctggatgggtgtgagctcctcagggtggggcgccgaaaccctcatggctcctgaggtagagccggcctccttggtaacacatgggactgggacttttaataccacccgacaggcccagcttgtctcgtcaagcgctaagtaaatggactcacgtcctatatgagggtttgaagttccatcacattcttcaatacatgacattatgttcttcatctttggacacgaatatatttgactaaaaatttgactaaaaaatcatctgaagaaataactgctaaatagttttattatttttgttctggaataggcttcttgaagataaaataagaaatttaaaaaatttttttgatccttcatgtaatactttgtaaatcttcatagttatttagaagcatccaaaatttccaaatggtaaaaaacgaataagaaaaatttttaggtaagtaaatttgggggaaatatttacaacagctaaaacggacaaatatttaatagtccgaatttcctgtttctttggcttaataaaatattgatgaatacaggctgggcacggtggctcacgcctttaatcccagcattttcggaggccaaggcaggaggatcagttgaggccagaagttcaaaaccagcctaagaaacatagtgagacacccctctcctcctcccaaactctaccaaaaatgaaagttagcctggtgtggtggcacacgcctgtgggcccagctattccaaagacaaaggtaggaggatcagttgagcccggaagttcaggcttcagtgaggtatgatggtgtcaccgcactctggcctgagcaacagagcaagaccttgtctcaaaaaataaataagtaaaattaatttaaaaataaaaaatatttgtctataccctaagaggaaaaggaacaaaactaaaaaatcaccattcaaaaatacaaatagtcaaggaaaaaaaactattaaagttacaatttaagaacttattgatcactttttcttctcttaattagttcttggatttgttgctcctgaatctcctgaataatctctcagaaataccacacatagatcaatggattaaattgactccacatattattttctttttcttttttctctttttgagacggagttttgctctagttgcccaggctggagtgcaatggcacgatcttggctcactgcaacctccacctcccaggttcaagcgattttcctgcctcagcctcctgagtagctggaattacaggcatgcatcaccatgcccagctaattttgtatttttagtagagacagggttttaccatgttggtcaggctggtctcgaactcccaacctcagatgatctgcccgccttggcctcccaaagtgctgggattataggcatgagctactgcgcccggctccacatactattttcaacaaggataccaaggcattttaaggaagggaagagtagtctttgttgaaaagactggaattagagatgcacatagaaaggaatgaattgagttccctgcctctcaccatatacaaaatcaactcaaaatggatcaaacacctaggtgtaagacttaaaacagtagaacatttagaaggaaatgtaggcataaatcttctggactttatagtcagcaattgtttcttaaccgtgacatcagaatcacaagcaacaacatcaaaaaaggaaattggacataaattgtaaaacattgtgcttcaaaacccaccaagaatgtgagaagctacccaaagagtgagaaaaattgtttgtaaattatgtatccaataagggatttgtatctagaatatataaagaagtcttgcaactcaataataaaaagcccaacaaaaatgggcaaagtaactgaataagcatttctcaaaaaaaaaaaaaaagtatacacatggctactaaatacttgaaaacatgttctatattaatcattaagaatatgcaaatcagccaggagcagtggctcatgcctgtaatctcagcactttgggaggtcgaggcaggaggattgcttgagcctaggagttcgaaaccagcctgggaaacaaagaaaaagactatgtaaatcaaaaccccaaaaccccaatgagatatactacttaggatgactaaaatcaaataaatatacaataacaaattttggataggatttggataaatagaaccctatatacattgatggtgtcactggaaaatggtagaactactgtataaacagtctggcagttcctcagaagaatgtagagttaccatacgatgtagcaattttagtcctaggtatattctcaagacaaaaccatatgttctcacaaagcttgtacacagatatttatagcagcatgattcatgatagccaaaactggaaagaaaacccaattgttcttcattttataagtagataagtaaaatgtggcatatctacacaatggactattatttggtaatataaggaaatgaagatctgatacaagctacaacatagatcaaccttgaacactatgctaagtgaatgaagctggtacaaaagaccacatatttatgattccttctatgtgaaatttcttctcatataaaatttccaatgtgggctaatttatagagactgaaagtaaattgtttcctaaattgaacggtggcagaaggaattgggatggtggctaaaggctttcatgctggcgtgatgaaaatgttataaaactgtgttgaaggtttcacaactttgtgactacattaaaaactactggattttacactttaaatgagtgaattggatggaatgtgaattatatacaaagttgttaccaaaagaaataaaaaagaaatacagagttttcaacaagtaaaaactgagagcatttgttgttagcagatcttctttataagaaatgttaaagaaaattcttgagaaagaataggacagaatcagaaatttgtatctaaacaagaaatgaagagtcagaattaaagttaatggaagtaaaaccatttttttcctcatatttagtttctctgaaagatagtaataatgttattattattattcttaaaattttttgagatacagtcttgctttgtcacccaggctggagtgcagtggcacgatctcagcttactgcaacctccgcctcccagattcaagcaattctcctgcctcagtctcccaagtagctgggattacaggcacgcgccaccaggcccggctaattttgtatttttagtagagacagggtttcaccatgttgatcaggctggtcttgaactcctgacttcaagtgatccaccaaccttggcttcccaaagtgttgagattacaggtgtgggccactgcgcccagactatcttattgttttttaaagacaggatcttgctccgttgcccaggcaggagtgcagtggtgcaatcacagctcacagcagcctcaactggtgcaatcacagcttatagcagcctcgacctcccaggctaaagaaatcctcctacctcagccttctgagtagctgggattataggtgtgcaccaccacacctggctaatttttaaatttttttgcagagacagggcctcactatgttgtccaggttggtctcaaactctggggctcaagtgatcctcccacctgagcctctcaaagtgttgagattacaggtgtgagccactacgcccagctcaatcatcttttaagcaatttaaataataagatatatttacccacatattagtcatttcctatgtaggtccaaatttccatctgatatcactttccatttgtctgaagaaccttaacatttcttagagtgtaggaaagcatcaatcctctcatcttttagatgtctaaaaaaatcagacatccacaaattttcaccttcgtacaaaagtattttcacattgtatagaattcaaggtaacatttttcatttctgcgctatacaagaattttgctcaactgtcttctaggttatgttggtttcaacaagaaatacttttattcttgcatttgttcctctctatgtagtctcctttctctgctgacttactctttatcactattttaaagcaattagattatgatcagtctttgtttagatttctacatttcttgtgattagaattcactgagttgcttcaatttgtaagtctacagttttcaccaattgggaaaatttttaagcttactaatccttttcctgcaatatctaatcatttctccagagtattttacatctcagacattgtagttttcatttgtggatgtttaatgtggtttaaaaaaacatctcccatgattctcctaaaagtgcttatatttcagccaggtgcagtggcttacacatgtaatcccagcagtttgagaggctaaagcaagaccctgtctctactagaaaatacaaaaaattagctgggcatggtggtgcatgcctgcagtcccagctaccagggaggctgaggtgggaagatcaactgagctcaagaggtcgaggctgcagtgagccatgactgggccactgcactccagtctgggccaaagagtgataccctgtctttaaaaaaaaaaagaaaaaaaaagtgcttatattttggtctacctttgtcaacatatgaaatatcattataattattctgataacctgtcaattctaatacgtgagacaattttgattaatcaattttgctcctcgttatgtgtcatgttttcctggtcctttgcatgtcttgtaacctttttttttttctttttttgagacagagtctcgatcttgttgcccaggctggattgtaatggtgtgatctctgctcactgcaacttccacctccccgggttcaagtgattctcctgcctcagcctcccgagtagctgggattacaggcatgcaccaccaggcccgactaattttttgtatttttagtagaaacgggttttcttcgttttggtcaggctggtctggaactcccaacctcagatgatctgcccacctcagcctcccaaagtgctgggattacaggcgtgagccactgcacccacccgtcttgtaacttttgattggatgctaaacattgaaatgttaccttgccaggtattctggtatatttttcaatatttttgagctttgttttgaaatatagttcacgtaacttgaaaacagtttgatctttttcatgggttctttttcagctttgataaggcaggaccagagcaagactaattagtccaaagctgatttttcctctctcttaagacagtatacttctgagtatccgaggtcttgtgaattatgagggtttttccactttggctattggtaacacctgctattcctggacttgtttgagctatgaggattattccctctattcatttcaagtgggtttttccacagcttcaggtgttttcacatatagctaactggtcagtactttcagctgaagattcaaagggaactccctggcagcgctccagagatctcttcatggaggttgttcctgtctagtactttgttccacataccctggcttctgcaaatcctcaagtttgtgtctcaattcgggaagaacactgggctctgcttctgttaactctccctgagcaatggactgaaaatactccagatgttaagttgggagaaataatagagctcaccttggtggtttctgcaaatggggattgtggtctgcttgttgttcagtgtctgaaaactgtcattctatatatttttaaaaattattgagatgggagggtacatcctaccctgttattatatcttaaaagtaagcaaaattttaatttttttttttttgagatagggtcttgctttgtagtccaggctaacgtgcagtggtgccctcatggcagcctcaaactcctggctcaagcgatcctcttgcctcagcttcccgagtaactgggactacaggtgcatgccaccatgcctggcaatttttttttttactttttgtagagatgagtcttgttgttttgttctccagccttgtctcaaactcctgggctcaaaggatcctcccaccttggcttcccaaaatgtggggattacaggagtgagccactgtgttcagcctaaaattatatcttgctttatctcaataatgcttatttaagaagaaaaagctaaaagaaaaacacttaatgatctcttccataagatcaccaagaccaaggccctgatcaagaaacatgtggttgataatccacatggtaaagctttctttttttgtgattacgtctttgcatgcgtgtgtctcagtgaagaccatggaaactagaggagtatctaaaaattgctcaattaccattaactgtagagagaaaaataggaaggaatagaacataagtgcataaaaatagtaagaatagccaggcacagtggctcacgcctgtaaccccagcactttgggaggccaaggcgggtggatcacaaggccaggagttcaagaccagcctggccaagatggtgaaaccctgtctctactaaaaatacaaaaaattagccaggtgtggtggcggacacctgtaatccagctatttgggaggctgaggcagagaattgcttgaacccgggaggcggaggttgcagtgagccaagatcgcaccactgcactccagcctgggcaacagagtgagactccgtctcaaaaaaataaaatataaatcaatattacaacttttttgcatattgtttccactttaaaatatttaagatgctttcagaccgggcgtggtggctcaagcctgtaatcccagcactttgggaggccaaggcgggcggatcacgaggtcaggagattgagaccatcctggctaacatggtgaaaccccgtctctactaaaaataaaaaaattagccgggcaaggtgatgggcacctgtaatcccagctactcgggaggctgaggcaggagaatggtgtgaacctgggagatggagcttgcagtgagccgagatcatgccactgcattccagcctgggccacagagcgagactccgtctcaaagaaaaaaaaaagatgctttcaagtatctgctaaaaattaacgacttttctttgcttttttagagacaggttctcactctattgcccaggatagagtgcagtagtgccatcatagctcactgcaatctcaaactcctaggatcaagcaatcctcctgccttggcctccagagtagctggtactacaggcatgcaccagtatgcctaattaaaaaaaatttttttttgtagacacagggtctcactatgttgccagggctgttcttgaactcctgacttcaagtaatcctccctcttcggcctcccaaagtgctggaattaaaggcgtgagccaccacacccagcctatgatttttaatatatacctaacattgctcaattaattttgcaaatgataattaagtgcttggcaatatttcattggttaaatccataagattattttttatctgaatagaatataagtattcagaatattcctaatagaaagttttctaataatggaaacattgtatacagtagtctccctcttatctgcaggggttatgttccaagacccccaggggaagcctgaaaccaaggatggcaccaaaccatcctatttttttactaaacatatgtacttatgataaagtttaatttataaattaggcacagcaagagattaacaacaaggaaacattagataaagaggggactactgtatctgtaaagtccaatacacatggctattgaacacttaactgtgactagtcctactggtgaactcaattttatgccttattaaatttaaattaatttaaaatggccacgtgtagctggtggctactgtatctacctgacagtgcagatctagaggaatgtcaattgcttaatatttaatgcaatcaatgctaattatgtgacaaattataattttaacatgaggcaataaaataaaactattagtggatatttactcaccctgcattaaaatttttcacacattaaagaatctgtcattctcatgagggctgctggtaagtatccaaacacgtctaagcagcaatgcattttatatatatatttttttgagatgaagtttcgttcttgttgcccaggctggagtgcaatggccccatcttggctcactgcaacctctgtctcctggattcaagcaattctcctgcctcagcctcccgagtagctgggattacaggcatgcgtcaccccacctcactaattttgtatttttttttttttagtagagatggggtttctccatgttggtcaggctggtctcaaactcctgacctcaggtgatccacctgccttggcctcccaaagtgctgggattacaggcgtgagccaccatgcggggcccgcatcttatattcttgctaaagagttctgaactcctagcattgtattgccaagaacacataatgcttgattttcattgaggggttcatgtggggatgcgtcttttatgtggaacccagtggtaataccacaatgtgcagtgctcacaggcgttgtgcctcgggcaggtacgcagctcagttaatctgttgctttcatagaaagtagaaattcaaatagagtatcaggtgattttggaagtgtttaacaatccagtattaaaactgtaagaaggaaaacaaaataaagaaaaaacaggaccatatgggtttaaagccaaattttatctaacctttaataaacaaataatggcaataacaaaaatttaaaaaattcttaattttgaatgttaatatatgaatgctaataatattaatatcaattttgaatatttggacaaaaatcccaaacaaaatattcataagataaattaagcagcttatcaaaacaataatataccacagctaagcatattatatttcagaaatggtttaaaacaagaaatcagaatgaattataacattaaaatagcagaggagaatgatatatgaacaaagcaaaagaagtgataggatttgaaaaaatataagaagttagccctaattatagagcatacttgcatacaacaaagtaaatattagttgaatggtaaaatattgtactgatttccattaaactgtttaaacaactaagacactggctattaccccaatacttgacataatcgtatttattttaataaaagtaaagaaataataatgattttaaaagaaaattcatttccattcatagataatctgactgaatacacagaaatctcacatactattaaaaatataaatagattaccagtttatggttagagtgataatggcaacatccaaatataatatgatagtatgtgggaaaactatcagtatcagaaaaatcatgaatgcactttaaacagctactctccaggaaaaggatattatatataaaataacagaagaatcaagatctagagtatgtgtgtgtattcataaatcagcaggttgagaaaatgagcaaaagaaacaaacaggaaagtcacagtaaataacatgattggctaataaatacatataaaaaatacttaatgggttagttaaaaaaataattatatttttagatggacaagtggagttactggatacttttatttccagctgaccagactagaaattacaagagtagaagagcatttggaaaagatccaagtatagatacatcagctatgactgcaattatagagttttgttatttacagactcctctgaaacaatattctaagtagagttttaaaaaattatctataacctaaatactgatcaggatgagagtttaaaaacatttaggccaggcgtgggggcgcacacctgtaatcccaacactttgggaggccgaggcaggtggatcacctgaggtcgagagttcgagaccagcctgaccaacatggagaaaccctgtctctactaaaagtataaaaaaaattaggcaggcgtggtgatgcgtgcctgtaatcccagctactcaggaggctgaggcaggagaatcgcttgaacctgggaggcagaggttgcagtgagtcaagatcggaccattgcactccagcctgggcaacaagagcaaaactccgtctcaaaaacaacaacaacaacaaaaaaaacccaaaaaacaaaacaaaacaaaaaaacatttaggtttttcattttgtagaaaagtaacagtagtacgagtacagaaaaaggtggttacttgcctatcatcatgtgagctgactgcattctcccggggattaatcacatgacaaaatgctgaaattccagtttgagggtcattcctttaggtcttggcagcatttcagcttatggtttcatgtcccgattttttttttttttttttttttgagacagagtctcactctgtcacccaggctggaatgcagtggcacaatctcggctcactgcagcctatgctccgggttcaagtgattctcctgcctcaggctccagagcagctgggattacaggcatgcgccaccacacctggctcatttttgtatttttagtagagatggggtttcaccatgttggccaggctggtcttcaactcctgacctcaagtgatccgaccacctcggccttacccaaagtgctgggattacaggcatgagccaccacactcagacttaagtgttagtaggtaatattaatagaaatggaagttccgaggtaattcttagatacactgggttatggaaaggcaaacaaactttctacaccacagtgcacgtcaatcttgtgagaggttaatcatgtggtttttgtttgttccaagagcaggagattgcttcattggcttgtctaagaacataaaccatttttcaattatcaagtacagtggtcatctaacctatagcaaaatcattctgcattgtgttttatttcattatcaaaacttaaaattgcataggggaaatgatgttaatatttaaaggcgaattatttcctttgtggacaaaagggatatgagcatgtagatcacaacgaatgatcacactgacactacagacacaatgaatgatcacgctgacactaaagacacaacaaatgatcacgctgacactacagacacaatgatgacgctgacactacagacacaatgaatgatcacgctgacactacagacacaacgaatgatcacgctgacactacagacacaacgaatgatcacgctgacactaaagacacaacaaatgatcacgctgacactacagacacaatgttcacgctgacactacagacacaacgaatgatcacgctgacactacagacacaacgaatgatcacgctgacactacagaactttggctgacaatgcataatgcgtgatgctccttagtttggaaaagtaatttttatagggctggaagtgagtttaggtagttatcaactgcaatcctgatttccaaaaggtttttaaaaaggtagtttttagaattgatggtatcgtgcacataattcatcccatttataaaactgtatataaagcttagaaaaattacaaggataaacacagatcaacattccttttctttcatttgtctagaatatattgaaccagaagaatgaattgactctgccagaaaaatgactattgcacaattattttaaaagaatcttagagtttgctgatatcatactcagaaattttccatttaccctaatgagtgaaactcatcttgttttcaatcatgttttaaaaattccgatttcctacaatatctatgtcattttgaaaaactatattctttcacaaatataattccttctcaaaatacattagagattgctaaatattttggtataaacatcaaaaattaactctttcttttgagactggttctcgctctattgcccaggctggagtgcaatggcatgatctcggctcactgcaatctctgcctcccaggttcatgcgattctcctgtctcagcctcccaagtagctaggattacaggcgcatgccaccatgcccagctaatttttgtatttgtagtagagatgaggtttcatcatgctggccaggctggtctcgaactcctgacctcaaatgatccacctgcctcggcgtcccaaagtgctgggattacaggcgtgagccactgtgcccggcaaaaattaacttttaatttaaaacattttcttcatatctcttttaaaatttttcttgattatatctagagatttagctcatgttccacaaaatgggagggggtaagatttgaataaaaactagttttatttcctaatcattaatctctttatctagttttattaattttttcttaatattggtatatttgttttcctttcttctagcctcatatattaacattgtttctatccacagatttatagtctaacctttaacaggcagttcatatgtgctacacagagagatgaatacaatgacatctttttgtttcaatccttgtttcctgaattaaagggattatgttttcaaattaacggatcaatgtagcacccatcaaattactaatgcaaaatggaattgttcaatggagagctgacagttgcctctttaagcaagctttacagtgtagcataaataatcatgtaaaaacctgatatgctttcagaagtctgcagcatcattcatgagatgttcttgacaaaaatctcaacctaatgaattttctagacataactgccaatttatgggaaaacaagggacagagcaacaagttaaatcatactgtgaagcagaaatcaagaatgtgggacattctttgggtacttaaaaaagaaaaattcaggctgggtgtggtggctcacgcctgtaatcccagcactttggtaggccaaggcgggtggatcacaaggtcaagagatccagaccatcctggccaacatgatgaaatcccgtctctactaaaaatgcaaaaattagctgggtgtggtggcatgcgcctgtagtcccagctacttgggaggctgaggcagaattgcttgaacccgggaggcagaggttgcagtaagccaagatcgcaccactgcactccagcctggtgacagagtgagactctgtctcaaaaaaaaagaaaaaaaaaaggaaaaattcaaaagcatgaaaaagtggggatattatcctagagaaaaggaataaattaaaaaaaaatcccaaatgcaatgaattaaccaagagtggatactgattagaaaataagtcgttataaaaaatctttgggcacatatttgaagacactatataaattattacatttttccagtatgattatagtatcacagttatccaggaaatttgcatatatttaaaggcaaagggccatggtatctacaacttactctcaaatgatacagaaataacccatacataagcggataaaaagagctgaaataagataaagcaaataacatgaatgtaaacatatatggtgggttactaaacaattctttcattttttctgtatgttaaattaaaatgtacatttcaaatttagggaaaacctccaagacaacaatttacttcttgatagcccattattaattcctacttaatcttaaattgtgaacagaaaatatgaactgttggctattatcaaaatcttggccaggcacagtggctcacacctataatcccagcaatttgggaagccaaggcaggaggattgcttgaggccaggggtttgagaccagcctaggcaacatagtgagaccccatctccacaaaaaatgaaaaaagcaaaagcaaaacaaaacaagatatgcaaaatcttttttttttttttttttgagatggagtcttgctctgtcactcaaactggagtgtagcggtgtgatctcggcccactgcaacctccgcctcctgggttcaagtgattctcgtgtctcagccctccgagtagctgggattacaggtgtgtgccaccatgcccagctaatttttgtacttttagtagagatggggttttgccatgtgcccaggatgttcttgaactcctgatctcaggcgatctgccagccttggcttcctaaactgctgggattagaggtgtgagccactgcacctggtcaaaatctttagacatgctaaaatcatattcttaatttccaaaattatataaaatttaataatagatgagtggctttcagaagctgttctaaattaattatgctattagaatctttcataaaaattaattatcagcaacacaaataatgacgatatctataataggtcatatttatttatttatttattttaagatggagtctcgctctgtcacccaggctggagtgcagtggcatgatcccgcctcccaggttcaagtgattctcctgcctcggcctttctgagtagctgggactacaggtgcgtgtcaccacgcccggctaattttttgtattttttgtagagatggggtttcaccatgttagccaggatggtctcgatctcctgacatgtgatccaccctcctcagcctcccaaactgctgagattacaggcgtaagccactgcgcccggccaatagctcatatttattgagcataacgctatatgccaaacagtcttcccaggttttgacaagtataatttcggccacatccgcataataggactcttatgtaccttttttctttttagatggggcctaaaaaagccaggctggtgtgcagtggctattcacaggcaccatcatagagcactgcaggcttacactcttgcctcaagcgatcctcccgcctcagtctcccgagtagctgggactacaggtgtgcgccaccatgcctgggtttcatgtaggctcttgattatactttgcaaataattcccatagatgataaatatcttggccaatgacacacagggagttatgtggcagtgatgacaggtaaggcatgtgccatggctaaaagcactattgcatatgtgacattaacaagttagtttattagtactaatttttgagacttcaacaatgattgagtggtgtcaggtgtggcgatttaaaaataaaaatatgtctgcaaatgttttgacatttctctctttaaaaagtgaaagtgggctgggcacagtggttcacgcctataatctcagcactttgggaacactgtgggaagactgcttgagcttaggagtttgagacaagcctgggcaagttggtgagacccccatctctacaaaaaatttaaaaattagctgggcatggtgacgcacacctgtagtcccagctactcgggaagctgaagcaggaggatcactgaagcccaggaggttgaggctgaagttagccatatgcactccactggacgacagtgaaagatcctgccttcaaaaaaaaaaggtgaaacttaattcctctcttactgaatgtaggccagacttagtgattttctgggaacaaacagaacgtggcagaactaacttccaaagagagattataaaaaggatcacatctgtcacgtcacaagcacactcaagcagcttatggacaaggccccttgggagaagaaacgacttgccagtataaacttatcagccacagaactaagccatttgaaagcatatcctacagctatagtcaagcctttagataagcacaacctcttgagacacttggagctagaactgcctagcttagctgctcccaaatttctgactcacagaaactgtgagaaaaatacacatttattggcattttaagccactaattcttcaggttctttggaatgtggcatgagataacagattttggtacctagacaagggatgctattgaaacaaaaagctacaaatgtcagaggggcattgggaccacaaactgggtggaaattggaagtgcctggaaaatattattagcagaaacctggatatttttgaggagctcctagtgagggcttaaagaaaactgaaaaatgttactggagactagggggaagggattcttgttatgcaacagcagaaagcaacatggctgcacgtggttactgtgaaaagtacaaaataatacctacagaactgtgtaactggcccaggctcgtgctataatcccagcactttgggaggtcaaggtaggaggatcaagagtttgagaccagctcaggcaacatagggagacttcatctctaccaaaaaaaaaaaaaaaaaaagaattagctagatgtagttgtgcatacacctgtagtcctagctactcctgaggctgagatgggcggatcacttgagcccgggagttcaaggttgtagtgagctatgatcacaccactgcactccaacttgggtggcaaagcaagattgtgtctttaagaaacaaaaacaaacaaacaacagcaacaaaaaaagtgggtaatttagcttaggaaactcccaagcagaatgttgaaggtgtcttgcttcttgttgcttaagtgctagaagtgagataagctagaaaaagactgttaaacagaagtgaaccaggacttgcttttggaaactcccagcctctccagaaagcaaatgatgctaaacttcagaaatagtctctggacaaagataaaatccagagtgctgttagggaaacatagtatgtaggtaaccttagggtatgtgttcattttgatcctctgaaaagcaaaaagcaagatcagatcagaaggaaggagggggctatgaatgaaaaagaggtccaggaaaggcagtgaaagccttcaggccatggtacaagatggatgactctgaaggagagggatgaagcaagattggtagaaaaactatgaaaacgcggggcagtatgaaaacagtttcagcctggctgattcacagttccccagctgaagggtctgggtttcgtaagaattgactagcatgaatacttatgttatgctcagaaaaggagctgggggcagcccataggaagcatggcctcaacattaacacaatgattatttcagagagggagcagagtgggcacttcacaggcaggttatctgttctccaaagaacagatagagtatgactgttaaaaacccttggttaagactccagcaatatctaatgtgacaattatgagaatcaccattcaatgaaacttctataaatggctctgtcagcagcctctgcagaagccctaggtagaggaggccggatttgcacgagagtgaatgaacaagtgagcatgagcaccagggaaaggtgatcctgaagattctgttcatctaggttcagctcacatgcaaagggaagggaattggacttcaggtttttttatttgctgtttgtgtttttgagacggagtctcatgctgttgcccaggctggagtgcagaggcacgatctcagctcactgcagcctccgcctcccaagttcaagcgattctcctgcctcagcctccctagtagctgggactacaggcgtgtgccatcacgcctggctaggcctcggtctcccaaagtgctgggattacaggcgtgagtcaccgtgcctggccagacttcaagtttgaagggtagagtttcaagaatttgaggacatatttttaaaacaccacgactggcattctgagtacaaattgcttatatttctacgtcatgcaaaatatgctcaagaagccacccaaattgcttgagcccagaagttgaaagctgcagtgagctatgagcatgcctctgcactccagcctgggtgatagagcaagaccctgtctcaaaaaacaaagacaaaaacaaaaacagacaaacaaacaaacaaaaaacggctccaaagtcacagctttctcctggcactctcactgtctaagccagcctgccagtgtgagcaagccacctggaaaacagatccttccgccccaaggagccttcagaagactgcaagctcatggaaagaccaattcaaaagcactcagttaagcctcttccgaatttctgaccctcagaacctatgagtgatgtttattgttgtggtaagacattaaggcttggggtaatttgtaatacagccattgaaatctagtatgaaaggcttttggtcatccttttaattaataagttttttttttttttcttttgagacggagtctcactctgttgcccaggctggagtgcagtggcgcgatctctgctcactgcaagctctgcctcccgggttcacgctattctcctgcctcagcctcccgagtagctgggattgcaggcgcctgccaccacgcccagctaattttttgtatttttagtagagacggggtttcatcgtgttagccaggatggtctctatctcctgacctcgtgatccgcccaccttggcctctcaaagtgctgggattacaggcaaaccaccgcgcccagccttaattattaagtttttttaaaaaaaaatccatgccatggatgttgtaggcatgaagaaactgggattcctgtttttttttttttttttcttaatttaccattgaatagtcagatattccattaaaacaggactgacattgaatgctttctaatgtggcaagatctgcattttgaactctctcaattgctaaagccatacctataagactaacattccatcatttctcaccagtgtgggctgtctgatgatgaatggcgcgctcgtactctttacggtcttacacttttatgctcctatgaattctctgatgggctttaagggctgaaccatatctgaaggttttcccacactgcttacacacatagggtttctcaccagtatgaattctctcatgttgaacaaggtttgaagcacgactgaaggccttcccacattctttacattcataaggttttccaccagtatgaattttctgatgttgggtaaggtagccatacattttaaaggcctttccacattctttacattcatagggttttttatcagcatgaatgctctgatgtgcagtaaggtgtgaactacgtctaaaggtcttcccacattccttacattcaaaaggtttctcatcagtatgaatactttgatgtagagtaagatttctatagaaagtaaaggtttttctacataccttacattcatagggtttcataccagtatgaattttctgatgttgattaagatatccatgcaagctaaaggtcttgccacattccttacatttatagggtttctcaccagtatgagttttccgatgttgaataaggtttgagccagtactataggccttcccacattcctgacattcaaaaagtttcttaccagtgtgaatattctgatgtcgagtaagatttctatacaaagtaaaggtttttttacactccttacattcaaagtgtttcatgccagtatgaattttctgatgttgtttaaggtagccatacaagctaaaggcctttccgcattccttgcattcatagggtttctcgccagtatgagttttctgatgttgaaagagttttgaaccagtagtataggtcttcccacattgcttgcattcaaaaagtttctcaccagtatgaatattctgatgccgagtaagatttctatacaaagtaaaggttttcttacactccttacattcatagggttttccacctttatgaattctctgatgtagaagaaagtatgaggcagtggtatagcccttcccacattctttacactcatatggctttttaccagtgtgaactctctgatgtacagtaagctggtgacctcttctaaaggcctttccacatttctcacatatgtatggcttctcatcagtatgaaactgcccatgttcaacaagatttgagcgcctactaaaagtcttcccacattccttacatttatatggtttttcgccagtatgaactctctgatgaattctaagatgtccaccttgactaaaggccctcccacactcctgacattcatacggcttcccaccagtgtgaattctctcatgttgaacaatgtgtgaggcatatataaaggccttcccacactgcctacattcataggttttctcaccagtatgaaatctctgatgcacagtcagctgataaccacttctaaagttcttcccacattctgtacattcatagggtttctcaccagtatgaaatctttgatgtagagtaagttgatagccactacgaaagttcttcccacactctttgcattcatagggtctctcaatgacatgaaacctgtgatgtagaataagttgataaccactactaaatttcttctgacatttcttacattcatagagtttctctctcttatatatgctctgaagttgtgtagaggatatatctgtttcataagtgggtacttctatgtagctgattatctcacactgtaaatccaaatctgaaacaaaagaggacaacaaaaaaaatttgtatttctataccagagaacaagaaactttatgcaacaaagaaaaaccaacattcataataagtgaatggcatatagaattcaaaaatatggttacgaaatttgaaaaaggccaaaaagagttcagagacgtatgagagtttacgtaagatagtgaaattactgattgaggacataggtaacatttaggtggggccagaatctttgacaagcttgttccaaatctgctatattggcaccgtcaaagaccaagtgaattaaaactgagaggagagaaaccttgacatctttattttgaacctatcactgatttagatgcaggtcagtgtttaagaatacatcctttaagtttctcgagtgatttttcactgttcttaaaataaaatacaaatccctttccaaggactgctgcttacctaggaggtctcatgtcaaaacatcagctctttgcttcctattctctatcatagtccctcttttcaacacctggaatatagtacaattgccccttggtatctgtggaggatcagttccaggacctcctgcagataccaaaacccaacccagataccgacgccttaagtccctgatataaaatggcatagtatttgcacataacctataaacatcttcctgtatactttaaatcatctctggattacttacaatacccaatacaatgtaaatgctatgtgaatagctgttctactgttgcttcgaaaataatggcaagaaaaaagcctgtatgtggtcagtaccctcacaatttaaaaatatatgtttgatctgaagatggttgaatccatgagtgcagaacccatagatacaaagggccaactgtacaacttcccccaacacttaatgctttccacagaccgtttaactgctcaagagtccttggacttagacattttgtaggctgaatccttctcatcctttatgtttcagagtaaatgttctttctttagaaaggcagtacctgctaactctgtctgtctctctatctttatctgtctgtttatctatctatccatccatctagctatcaatcaatcatcaagacagagtcttgctctgtcactcaggctgaagtacaatagcccaatcatagttcactgcagccttgtactcttccagctcaagcgattttcccacctcagcctctcaagtaactgggactacagatgcacaacaccacacctggctaattttaaaattatgtgtagagacagggtctcactgtgttgcttatccaccgtgatcaagttggcttcatccctgggatgcaaggctggttcaacatacgcaaatcgataaacataatctatcacataaaccggaccaaagacaaaaaccacatgattatctcaatagatacagaaaaggcctttgataaaattcaacatcccttcatgtcaaaaactctcaataaactaggtattgatggaacatatctcaataatagctatttatgacaaacccacagctgatatcatattgaatgggcaaaagctggaagcattccctttgaaaaccagtacaagacaaggatgccctctctcaccactcttattcaacacagtactggaagttctggccagggcaatcaggcaagagaaagaaataaaagtattcaaacaggaagagaggaagtcaagttgtctctgtttgcagatgacatgattttatatttagaaaaccccatcatctcaggccaaaaactccttaaactgataagcaacttcagccaagtctcagggtacaaaatcaatgtgaaaaaatcacaagcattcctttacaccaacaatagacaagcagagagccaaatcatgaatgaactcccattcataatcgctacaaagagaatgaaatacgtaggaatacagctaacaagggatgtgaaggacctcttcaaggagaactataaaccactgctcaaggaaataagagaggacacaaataaatggaaaaagattccatcctaatggataggaagaatcaatatcatgaaaatggccatactacccaaagtaaattatagattcaatgctattcccatcaaattaccattgacattcttcacagaattagaaaaaaactgttttaaattttatatggaatcaaagaagaccccgtacagccaagacaatcctaagcaaaaagaacaaagctggaggcatcatgctacctgacttcaaactatactacaaggctacagtaaccaaaacagcatggtactggtaccaaaacagacatataaaccaatggagcagaaaagagacctcagaaataacaccacacatctacaaccatctgatcttcaacaaacctgccacaaacaagcaatggggaaaggatctcctactcagtaaatggtgctgggaaaactgggtagccatatgcagaaaactaaaactagaccccttccttacaccttatgtaacaatcaactcaagatggattaaagacttaactgtaaaacccaaaaccataaaaaccctagaagaaaacctaggcaatgccattcaggacataggcatgggcaaagatttcatgacaaaaatgacaaaaaccattgcagcaaaagccaaaattgacaaatgggatctaattaaaccaaagaccttctgcacaggaaaagaaactatcatcagagtgaacaggcaacctacagaatgggagaaacctacccatctgacaaaggtctaacatccagaatttacaaggaacttaaacaaatttacaagtaaaaaccaaacaacacatcaaaaagtgggcaagggatatgaacagacacttctcaaaagaagacatttggctgcggtggctcatgcctgtaatcccagcactttgggaggccaaggcgggtggatcacgaggtcaggaattcaagaccagcctggccaacatggtgaaaccccatctctactaaaagcacaaaaaaaattagccaggcatggtggcaggtgcctgtaatcccagctactcgggaggctgaggcaggagaatcacttgaacgcgggaggtagaggttgcagtgagccgagatcaagccactgcactccagcctgggtgacagagtgagaatccatctcaaaaaaaaaaaaaaaaaagaagaagaagaagacatttatgaggccaacaaacatatgaagaaaagctcaacatcatcatcagagatcatcagagaaatgcaaatcaaaaccacaatgagataccatctcacaccagttagaatggcgattattaaaaagtcaggaaacaatagatgctggtgaggctgtggagaaataggaatacttttatactgttggtgggaatgtaaattagttcaaccactgtggaagacagtatggcaattcctcaaggatctagaaccagaaatacatttgacccagcaatcccactactgggtatatacccaaagaaatataaatcattctactagaaagacacatgtgcatgtacgtttactgcagcactatttacaatagcaaagacttggagccaacccaaatgcccatcaatgatagactggataaagaaaatgtggtacatatacaccatggaatactatgcagccataaaaagaaatgagatcttgtcctttgcagggacatgcatgaagctggaggccatcattctcagcaaactaacacaggaacagaaaaccaaataccacatgttctcactcataagtgggagttgaacaatgagaactcatggacacagagaagggaataacacaccagggcctgttgggggctgggaggtgaggggagggaacttagaggacaggtcaaaagatgcagcaaaccaccacggcacacgtatacctatgtaacaaacctgcatgttctgcacatgtatccatgtatcctgttttttttttagaagaaaggaaaaaaaaaagactactgatgtcacacagatacaccaaaaaggtatgaaagggtttataactctcatcatgaggctttctagagagcagagcagctcccaagcaggtcataaaacaacttgagagattaggaaaaggaggctggcttggagtttgcatggtggttagggtgtggtgctgggctgagtgttcctgctcatggcatggggttcacatggtttgaatgagaaggagggagcacctaggttttttaccagctggcccagaagtagacagaaggggaaaaaaaaagaggagtcatcagcagttaaacatcaaaaacagagtcagggactggagtggtggctcacgcctataatcccagcactttgggaagccgaagcaggaggatcactcaagcccaggagttcaagaccagcctgggcaacacaataagacctcttctttacaaaaaaaaattaaaaacttggctgggcatggtggcatgcacttgtggtcccagatattcgggagggcaaggtgggagaatttctagagcctaggcggccaaagctgcagtgagctgtgttcacgccactgcactccagcccaggcaacagagcaagaccctatctcaaaaaaaaaaaaaaaagaaaaaaaaaaagaaaaaagaaaaagaaaacacttttttttttgagatggcatctcgctctgtctcctaggttggagtgcagtggtgcgatctcggctcactccaagctctgcctcccaggttcatgccattctcctgcctcagcctcccgagtagctgggactacaggcacccgccaccacgccccgctaaattttttgtatttttagtagagacagggtttcaccatgttagccaggatggtcttgatctcctgacctcgtgatgtgcccactttggcctcccaaagtgctgggattacaggcgtgagccaccgtgcccggccaggaaatacttaaagaaaaaaaatgctctgtcactcaggctggagtgcagtggtgtgatactggctcactgcaacctttgcctctcaggttcaagcaattcttgtgcctcagcttcccgagtagctggggccacaggcacccaccactatgcttggctaatttttttgtatttttggtagagatgaggtttcgccatgttggccaggctggtctcgaactcctggcgccaagtgatttgcttctgtctgcctcagcctcccaaagtgttaggattacagacgtgagccactgcattcagccaagactttaatttttttggggggtgggggtggtaggatggagtctggctctgttgcccaggctggagtgcagtgacacgatctcagctctgcaacctctgcctcccgggttcaacggattctactgcctcagcctctggagtagctgggattataggtgcttgccactacgcccagctaatttttgtatttttagtagagacagggtttcaccatgttggacaggcttatctgaaactcctgaactcaaatgatctgcccgcttcagcctcccaaagtgctgggattacaggcgtgagccaccacacttggcaagattgtaatgttttgaaagcagttttaaccatctctattttctaatgaactataatgtacatagaggatttcttaatgttataaatatttctttataagggttataaataattctgtatttctctattaacatggtatgaaataaagaaagcaaattatccaaagtctgattaaccaaagacaatccaaagtctgagtggaacatttaatcaataaagatccagaacttcatagatacaattcaaatactgcagagctcagttaccttccagtcacacacagattgttcctaaaaactgaccatatactgggctataaagcaagtttcatgtatttcaaaggatcaagattgtatagagtatgtagtctgaccacaagaaaaattttatgctagaaatcaatactgcaaagataactagacaacatatatttggtaattatatactgcttgtaggtaatcaatatactgaacaaacagtgcactgtgatatgataaaataacaaactttggaaaatgatgttttgactgaaaattataaggccatacactaaaggaagtatatacaaacactactcaagtgagtaaacttgatgctcatgggggtacaggttaacaactcagaaatgtgttacacatacactggagttgaatagatacagaaataaatggtggacggggagagccagttttcctgctgtcagggtaaaaagttacatataaacaagacaggaagattagaatacattttgtagtagtagatgagagtcagagacattagtatgaactcatgtttagcttcagatgcatacaaatggatagacaaaaagacaattattaatatatgtaagcatacatcggcgaatgtgcatatatccattacccagaccttgttttttttttgggacggagtcttgctctgtcgcccaggctggagtgcagtggtgcgatcttggctcactgcaacctctgcctcccgagttcaagcgattatcctgcctcagcctcccaagtaactggcattatgtacagacccgcgcctccacgcccagctaatttttgtatttttagtagagacggggtttcaccatgttggccaggctggtcttaaaaactcctgacctcgtgatctgcccgccttggcctcccaaagtgctgggattacaggcgtgagccaccgtgcccagctgaccttggtttttaaatcccattctccactaaaaggaatcacactcctgggagaaacagctgattccaggaccacgggagggagaaaacaaaatgaacctgaaggtagtaccaggaaagaagtcctcaaaaaacagaaggatcagggtattaaatgaacataggaaccaagctaaaagagctatcaatgtctgaagttgaaacggtatgggtggcaaaagaagtaatgtaatatttgattctaccttgaagtataaaacaaatataaatgagtctacactgatatgagaagaaacaaatatgtcttatagaagaattctgtctgaagttgaaacggtatgggtggcaaaagaagtaatgtaatatttgattctaccttgaagtataaaacaaatataaatgagtctacactgatatgagaagaaacaaatatgtcttatagaagaattctatctgaagttgaaacggtatgggtggcaaaagaagtaatgtaatatttgattctaccttgaagtataaaacaaatataaatgagtctacactgatatgagaagaaacaaatatgtcttatagaagaattctagatattaaactctatggaatgtaaagcttaatttccacttctatgtacctgctcccagggtgggctagacttaacaagttgtttctaaagagtagagaatggaaaaggaaaaaatagtacatttggagtgaagaaacctggcagacactactttagccaaatgataaaggttaatatcaccagtgatgtcatgtacccctgatgtaatgtgatgaaaagcatacttcacctctcttacagtctttctttttttttttgagatggagtctcactctgtggcccaagctggtcggctcactgcaaactctgcctcccagattcacgccattctcctgcctcagcctccaagtagctgggactacaggcgcctgacaccatgcccggctatttttttgtatttttagtagagacggggtttcaccgtgttatccaggatggtctcgatctcctgacctcgtgatccacctgcctcggcctcccaaagtgctgggattacaggcatgagccaccgcgcccggctgttacagtctttctaaaaactactacttccagcctaattacaaaaaaacaacagacttggattgggagaacactactggcatggtctgtcaagacagtcaaagtcatgaaaaacaaagaaaagcagaaaaaactgtcacagaacagaagagactggaagataagacaaatgtatacaatgtggtacccctaactggatgcatcttggaacagaaatatgagctatatggaaaaactggtgaaatcccaatggagagtctcatgtcagtttcctagttttgacaaacatactttatgtaagatgttaacaatggtggaaagtgggagagatgtatacaggaaatctctgtattatctttgtaaatctgtaaattttgtaaatctaaaattattctaaagttaaaaagttattttaaaaaaagttaattaccagtggtctttgtttggttggtggagaaaagaaaacaaacaaaaacgatcattacgcactacttctgcaatattcttggcaaaaaatgtttaatcttactctaatcatgaggggaaaccatcaaacctataaatctgacattccacaagaaaactggagtagacacttcaaaaaagccaaacccaaaggggaaaatgtagtaaggtaacaccaagataaaaagcctaagacctggctgggcatggtggctcatgccttaaccccagcactttgggaggccaaggcaggcggatcacaagttcaggaattcgagaccagcctggccaatatggtgaaaccccatctctactaaaaacacaaaaattagccaggcgtggtggcgggcgcctgtagtcccagctaactcggaggctgaggcaggagaatcgcttgaacccaggaggcagaggttgcagtgagccgagatagcaccactgcattccagcctgggcgacagagcaagacttggtctcaaaaaaaaaaaaaaaaaaaaaagcctaagacctaaatgcaatgtatgaatacacaatggatcctggaaacattttataaatgacatttttagaaacagcataacaaatgtaagtatagactctatagtagataagactacattactattataataatattgtgactttgaaggagaatgtctttattcttaggagatgtacatagttaagaggtgaaatttaatgacaactgctacttaccatcaagtgagccaagaagaaaggtgcatatatacagagaaaaagtaaggcaaaatgttaataaccaaagatgaatctatgtgaaaggtaattaactgtatatatattatatattatacattatacacatacacacacatacatatatacacaaatatatatttttaaaatattctcccttggcttgatgatttttaaaataaaaagctggggaaaggaaacagcaacccagaatttaaggagatattacctaaattcccatataaaattatttttaaccaaataatagtaggtttatatccatttatatttgatagcatgaaagaagaaaaaacaatttataaagcagatgtaaatacatatgagaaaaggagaaaacttgaaaattggtgacctatatattcatcacaagaagctggaaaatgcaacaaataaacaaaaataagatataaaagtccagtaattttaaaaaatggagttcacaaataccacagaagagccaaaacggcagatattttatttcaaactaatgttactgatgcaattctctcaacactgatgaagaaaaaagtaaatgctacaatatccaacctaggagtgctaccaggtacctcagctatagctctccacactgcacaaacacagtaagatggcattaggataaaaacatgttactaacttgcttgaaatgcataaaactctaaaaagtagccactgcaaaatcaacacacagaaaacttggacaattctataagcattatgtaatttgcataagtttttaaaaagcacaatggaaactgaagtttcagatttttttttctggagtgtttcttcagacattctaagagggggtaaaagggtacattccctcaacacatgtatgaagctaatgaaacacatccaacattatttttttttaattttttttttttttgagatggagtctccctttgttgcccaggctggggtgcagtggcacgatctcggctcaccacaacctccgcctcctgggttcaagcaattctcctgcctcaatctcctgagtagctgaggctacaggcctgcgccaccatgcctcactaatttttctacttttagtagagacagggtttcaccatgttagccagactgggtcacaaactcctgaccgcaagtgatctgccggcctaggcctcccaaagtgctgggattacaggcatgagccactgcgcccagccatccaacgttaggaaggataatgaaaaacaaaattgcaatccaatcccactcatgaaacctaaagaaaacattaaaagttcagatataattgataagagataaaatatcaacacatgatgaccaaattggagtccagcatgcaaggttagtcaagtactagaattcaacatagtacagaataatggaggaaaaaaatcgtatgaattttgttaatacatgcagaaagaatgattcctaagaaaaattttagcaattgtataaaaaagcaaacctcctccatgtgaaagagtatttatataaattgttaaaaaacataccttagccagacacggaggctcacacctgtaatcccagcactttgggactctgaggcaggagaattacagcagtgagccgagatcacactactgtactccaaccccagatgacagagcaagacccagtctcaaaaaaaaaaaaaaaaagtcaactgcctttttcttgtggaaaatgacaagctgaactaaaattcatatgtgaatatagaagactcagaatagccaaaacaatcttgaaagacaagaattcaagtatcagtactcatactttgtgacttcaaaactttttataatgctacagtaaatcaagcagtatatagtactgtatatagacagtatatatactgtctatagtagtatagtatggtatatatactgtgtatatatacagtatagacagcatatatactgtgtatatatacagtatagacagcatatatactgtgtatatatacagtatagacagcatatatactgtgtatatatacagtatagacagcatatatactgtgtatatatacagtatagacagcatatatactgtgtatatatacagtatagacagcatatatactgtgtatatatacagtatagacagcatatatactgtgtatatatacagtatagacagcatatatactgtgtatatatacagtatagacagcatatatactgtgtatatatacagtatagacagcatatatactgtgtatatatacagtatagacagcatatatactgtgtatatatacagtatagacagcatatatactgtgtatatatacagtatagacagcatatatactgtgtatatatacagtatagacagcatatatactgtgtatatatacagtatagacagcatatatactgtgtatatatacagtatagacagcatatatactgtgtatatatacagtatagacagcatatatactgtgtatatatacagtatagacagcatatatactgtatatagtacatagtaccgtatatatactgtatatagtacatagtaccgtatatatactgtatatagtacatagtaccgtatatactgtatatagtacatagtaccgtatatatactgtatatagtacatagtaccgtatatatactgtatatagtacatagtaccgtatatatactgtatatagtacatagtaccgtatatatactgtatatagtacatagtaccgtatatatactgtatatagtacatagtaccgtatatatactgtatatagtacatagtatcgtatatatactgtatatagtacatagtaccgtatatatactgtatatagtacatagtaccgtatatatactgtatatagtatatagtacagtatatagacagaaagactatgtgtgtatatatatacacatacacttacatatatctcaaatttatgattaattcattatcaaaaagggtgccaacaaaattcaaaggagtctctttagcaatagtgctagcacaactggatattcacatgcaaaagaatgaagctgggcatctatctaccctttgtatcacatatgaaaattaactcaatgtggatcaaagacctaaatgtaagagctaaaactactaacttagaggataacatagaagtaaatcgtcatgaacttggattacaaaagtttcctagacaataatatcaaaagcacagcaacaaaagaaataataggatggaatagaatattattcagccataaaaaaagaatgagtattgatacctcctattatatggatgaaactcaaaaacattatgctaagtgaaagaaagtcattcgcaaaaggccacatgttgcttgattccttttttatatgcagaataagcaaatctatcgatatcaaaggagattaatggttgccagaggctgagagtgagaggatagggaatgactggcaatgtgtatgagctttcttttctctttttttcagagatgaggattttgctctgttccctaggctggagtacagtggcatgatcatggctcactgcagcctcaaccttcagggctcaagccatcctcccatctcagcctcttgagcagctgggacaacaggcacatgccaccgtgcctggctaatttttgtactttttgtagagacaggatcctactatgttgcccaagctggtctcaaacccctgggctcaagcaattctcctgtctcagcattccaaaatgctgggattacaagtatgagccatggcatttgaactgtataatttttgtaaacttttgtctaacattatttcaggctgggtgtggtaactcatgtctgtaatcctaacactttgggacactgaggtgggaggattgcttgagcccaggagttcaagatcagcttgtgccaaaaagcaagaccccgtctctacaaaaaaatttttaaaaaatcagccggggttggggcagggggtgtggcacacatctgtagtatatattttagttatatattagtgtacatctattcatgcaaaattgttatatttcacagtaaaattttattattattttaatttttgtgggtacaatgtaggtgtatatatttatggggtatatgagatattttgatacaggcatacaatgtgtaataatcacttcagggtaaatggaacatccatcacctcaagtatttatcctttgtgctacaaaaaatccaattatattcttttagttattttaaaatatacaattaaattattattgactatagtcactttgttgcgctatcaaatactagatcttatttatcacagtaaatttttttttaaagagaaaacagtagctataaaagacaggcagaagaagtatatttgtaaatggaaatatatggtattcaaaataaaaacagaaagaactggagattattaacattttaagatattactccagaaaagtttctggacattatcagcacatgaattatatattaaaaagccactatgtataccaaggaaaactaactagaatggtccatttaaagcacatactattagagttctatgacttcaaaaaacaaaaaaatttttatagttgccaggcaaaaagatcaagtcactttgaagggaggaaatatccagtgggcattagagttacacttagtgttacttaaactcagaaagtaaaggagcaataggtacgaagttctcaagaaaagtaagatgaattaagaatttgatatccaaagtatctttcaactacaaaaatagccaatagtttaaatatacaagaactctcacaatatatttctcctgatctcatcttggcaggctctttggtcattatcaacagccgggaaatggagaactgggaacatacagcgactacaatgtcagatacataaaagggagtaaaagataaaagtcatgttcctagaaaagttgggagaatgtctaaagaagtaattcatgtaaaaatgctgatttggggacaaacatccatgaatgttgtgtggtcaatttgtataatattccatggaaaagactgtcatttaaagctagcatatcaaataattgaaaagaatggccgggcacggtggctcacgcctgtaatcccagcactttgggaggccgaggtgggtggatcacgaggtcaggaatttaagaccagcctggccaagatggtaaaactctgtctctactaaaaatacaaaaattagccgggtgcagtggcaggtgcctataatcccagctactacggaggctgaggcaggagaatcgcttgaacccggggggcagaggttgcagtgagccaagatcatgtcactgcactccagcctgggtgataaagtgagactccacctcaaaaaaaaaaaaaaaaaatgaaaccagaaagcataatacaaaaagaaccaaaaattgtcatacaataaatgtaaaaatgtgaaagtctctattaaatggcttttgcttgcattccagaaaaaaaatccatttctagatttcatttaaaaaaaaaaagactctaaaatagaatgatgagaaagggtacagaaggcaaagtttaaaaaaaggtatcttaatcttgatatcaaaaaattttgaattaagggaacaaattacaaaatagaccaaatggcactccataatattaaacaatgaaataacaatgaatttaaaagttaggaacagccacacaacataacacctactatcaaatcaattttcaaagaaaaagaattaaaagatttctaaaaataaaaagtaactaattagaggtaaagaataacagtctcaaattaatagaataaatctattttatttattttttttgagacagagtctcgctctgtctcccaggctggagtgcagtggctccatctcagctcactgcaagctccgcctcccgggttcacgccattctcctgcctcagcctcctgagtagctgggactacaggcccctgccaccacgcccggataatttttgtatttttagtagagacagggtttcactgtgttagccaggatggtctcgatctccttacctcgtgatccgcccgcctcggcctcccaaagtgctgggattacaggcgtgagccaccgcacctggcccaatggaataaatctaaataagcactgatgaaatctaattacaatgcttatctctgataataaactttatttcaagtggacaaagaatacttaaaacattgacctcagagcattcatggaaatctaaccacatagagcgccaacaatttgttgagttgacatttcaacaagttcttgaagaattaggaacacagactttaatctctaacaagaacatagtaccattggaaatttatagcagtatcagagagcaatttctattacatgaagtaaaataactctattttaattgacctgaagcaaggggccaaaataaactaaaattataactgtgtaaacattatataactagatagaacagcaaaatctgtgctcaaagcaaaatctatggccttaaatactgaagagatcaaaaaagaatgaaaataagtgagtaattatgactcacaaatttcaaaatcagaaagaaaataaattgatgcaacagaagaggcattggtaaaatcagagcaaaaatgatttactgtatttagaaaaatataaaacaactgcaaaatggttcttcgcaaaaaaaaaaaaaaagttaaatgaggcaatgcagtaagaataaaaggcaaatttcctaatacatgaaataaagaataacatgaggaaattaatcacttttataaaccttgtaagaaaagcccactacttgggctcaaccctgtgctctttcgcttaggttaacacgctaacctgtattatcccaccactgacccttcagggaagcctgcagggaaaacagatgtctggctgtctcctaatgactgatactgtgaaaaggctgttggctcctatctgcgaagtgggcacagagttgttatatctcagtaaactgatccttattttacctaggatcaatgtcggcctaccaacttcctttctcagaataagagatctttagatcacttaattcaaggagatttcgtgggcctgatgccacttaaagaactttactgttgaagggaaattctgccatctccttcttcccccaaacctcttcatgttatgctttatgagggctgaaaaatgttaagaattgtacatacggtttcagaaatagtagattaagatcatgggattaaagcacagaactcctcaacggaggtgcataaaattgcaggcatggtcactcaaaagagagctgctttagatgcaatgctggtctaagggggcaggcttatgtgctgtcttatgggaagaatgttatatcactagaggtctctgtggaatctttaatattactaatattaatgactcagaaaacagagtcgcaataacattaggaaacttgcagaatgctcccacttacctagttataatggctctttgcattcggtaaggaatctgttcttttgttttaatttggcctctgttggctcctgatttaggagactataaactgtgattgcaattcttccctaaatacgtttgttcaaaagtgtgatctccagaataataaaatgctactatatcattttatatatatacaatatataatctcatattatgataaaataataaaatgctactatacagtcatatatatagcaatgctactatatatgttccatcgaatgagccaacaaattatcttccaacaaaaggaatacaaaaatatgaaatgtatggagattagaataaccatgagggaaaacttttaaaaacacaatgataacctcaaacagcactgtacatctgaactagtgttcccacataagtttatcttccatctcaagcagaaggatgaccaaaaatggaaaaatgggggttactgaaaagtgaaaccaacacaatcccctcttaaggccaattgcttactcatcaaggctccaagtatctcacctctcactgcctacccacactaaaattattattgttgttattattattattattatttttgagacagagtctcactctgtcgcccaggctagagtacagtcgcatgatcttggctcactgcgacctccacctcctgggttcaagcaattctcctgcctcagcttcccgagtagctgagactacaggcgcccgccaccgcgcccggctaattttttgtatttttttgtagagacggggtttcaccgtgttagccatgatggtctcgatctcccgacctcgtgatctgcctgcctcagactcccaaagtgctgggattacaggcgtgagctaccgcgcccggcccacactaaaattatgatgtcatagactcagccccatcccaattagttcgctctgttttgcaaaacctgccttaaaaattacttttacactgttggtgggactgtaaactagttcaactactgtggaagacagtgtggcgattcctcagggatctaaaactagaaataccatttgacccagccatcccattactgggtatatacccaaaggaatataaatcatgctgctataaagacacatgcacatgtatgtttattgcggcactactcacaatagcaaagacttggaaccaacccaaatgtccaacaatgatagactggattaagaaaatgtggcacatatataccatggaatactatgcagtcataaaaaatgatgagttcatgtccgttgtagggacatggatgaagctggaaaccatcattctcagcaaactatcgcaaggacaaaaaaaccaaacactgcatattctcactcataggtgggaattaaacaatgagaacacttggacacaggaaggggaacatcacacaccacacaccggggcctgttgtggggtgggggtaggggggagggatagcattaggagatatatctaatgtaaaggatgagttaatgggtgcagcacaccaacatggcacatgtatacatatgtaacaaacctccatgttgtgcacatgtaccctagaacttaaagtataataaaatatatatatatatatatatatatatatatatatatatatatatatatatatatatatatataaaattacccagttgctacttttctgtggagcacgttttttaaaaaaaaaaagaggctggacgcggtggctcacgcctgtaatcccagcactttgggaggcaggggtgggtggatcacctgaggtcaggtgttccagaccagcctggccaacatggtgaaaccccgtctctattaaaaatacaaaaattagccaggcttggtggcacacacctgtaatcccagctacttggaggctgtggcaggagaattgcttgaacctgggaggcggaggttgcagtgagctgagatcgggccactgcactccagcctgtgcgacagagcaagactccatctaaaaaaaaaaaaaaaaggaaaaaaaaaattacccagtctggttctaaaacctgataagtaagtttcctggtttcttattttaagatactactgttactctttcaagaggttgttctcccttttttgcaataaatctaataagcttagctttgctagatgaacagaaatgtctggtaattcttggaagtcaacagtatatagacaccctaggaagtatatgaaaaatatcgttaaatatagaaaaataaatattttgaaatatcataaacatataacaagtaagtccaactcaaaataatacaaagtaccagaataatgaagatatatcaggaaggctgctattttcagacaaaaatcagttgctttctaatatatcaataataactaattataggctgatatatcaatatatctaatatatcaataataactaattataggctcacacctgtattttcagcactttgggaagccaatgcaggaggactgcttgagcccaggagttagagaccagctgagcaacccagtgagacccccatctctaataaacaaacaaacaaacaaaataacgaatcacacaatatagaagtatataattacatattatagaattatgtgttatacaagttcttaatctctgacaagaacatagcaccattagaaatttatagcaatatcagagaacaatttcttttacatcaagtaaaagaactctattttaattgacctgaagtttaactgtaactcaaaagtttataaacatttaataaaatacaaacatagatttagttttaagggtttttaaaaactatcatttttcaaatttctttttaaaaattatagtttagaccaggcgcggtggctcacgcctgtaatcccagaactttgggaggccgaggcaggtggatcacgaggtcaggagattgagaccatcctagctaatacagtgaaaccctgtttctactaaaaatacaaaaaaattagccaggcgtgatggtgggcacctgtagtcccagctactcgggaggctgaggcaggaaaatggcgtgaacccgggaggcggagcttgcagtgagccaagatcgcgccactgcactccagcctgggcaacacagcgagactctgtctcaaaaaataaataaataaataaataaataaaaatgaaaataaaaattatagtttaagttagagtgtagaacttacgttgttggtttctttaccctaatttaataatggcgtatcaaccttcactcgtctttgttcattttcactgcaactggataaatgattagatattactgccagtgtggcaattcctttagtatatgtaaaatttggacaagatgaaatggagaagattatttttctcagcttcagcaataagaaatgcaaacgataaagactgacattgttcacatacatgatttggagttttaagatttgtataaagcatgttctggtgttgcagcttcaaaagaacaggaaaatactccagagtgattggccacattgccacacatacgtacatagctgccagttcaatgagttaagagggcctagcacgaagagggtccacgagcaattaccatacctaagcctagatctggatttctaaatggcgttcccaataaaaggaactggtgctccttacagaagtggctgattccagggctatggcaaagaaaatataagataatcctagattaacaacttgtagtaccagaaaataagaaatgctcaccaaaggtgagcaggttgaaaaggcacagatgccaacttgaaagagttcccaatggccaaagcagaagacaaataactaaggatagtataggattataactcatggaataaaataaacatctatgagtccatattgatataaataattgaataaatagaggaaaaagggagtattccttcttacagaagaattccagctaatgggccaggtgcggtggctcaagcctgtaatcccagcactttgggaggccgcggcgggcagatcacaaggtcaggagttcgagaccagcctgaccaacatggtgaaaccccgtctctactaaaaatacaaaaattagccaggcatggtggtgcatgcctataattccagctactcaggaggctgaggcagaagaatcacttgaacctgggaggcggaggttgtagtgagctgagatcgcgccattgcactccagcctgggcaacagagtaagagtctgtctgaagaaaaaaaaaaaaatgtttccagctaataaatgtaggaggttaatgcaaaatcatcagtaggcaaatgttgcattaaagatgtgtacaagcaggccgggcgcagtggctcacgcctgtaatcccagcactttgggaggctgaggcaggtagatgacctgaggtcaggggctcaagaccagcctggtcaacatggtgaaaacccatctctacaaaaactacaaaaattagctgggggtggtggcacaagcctgtaatcccagctacagcgcctgtaatcccagcctgagcctgggaggcggaggtggcagtgagccaagacagcaccactgcacctgcactctagcctgggtgacaaagtgaggctctgtctcaaaaaggaaaaaaaaagaactggtataagcaaaatctactgttggaagctaaaatctgtggtggggatcagggggtgtaaaagttggaggagaaataggatatctgtattgttttcctgggactcacaaaataataccacaaaatgaagtccgcaaagcatcctcagaagcaaaagttttttctcggaccttctcttgccctcctgtctctcagtcccattctccccctaggctaaccataaagactagaagccctcttccccaaggcaagtcatggaaaccagaaccccttgtccccagagctactcataaaacctaaaaatattactctaactttcccctgcctttttgggtaaaaactggccataaaaaattccctggcctactttgtttgactgttggtcataagacccccattccagagagtgtcccccattccggaaggaaggaatacgtgttctgagaggccaagaagaacctagacagacaggccttgctgggtttccctactcaggctattagcattagatcacaccctttttgcccaatcctgtttctacatagctgtccatactttgttaaacctaagcataaaaataggtaatttcccctgtacctttggatcttctttctaaaggctcctgtgtcatgaaaaagtatgattagatcaatttgtatgccttttcttctcaatctgccttttgtcagtgattttcagtgaaacttcagagggtgaaaaagaagtttttccttggcccggacagatacaattatgaaaagcatctcaaacaagttatatcatattagcattgcctaaggcacaaattcttatttcaccaaattataatattagcattgccagtggaacaaactattattgtctcctcatgtgatacaatgggaagaatagaacatcacctgggggcaatttttcaaaatatgttgggcttgaatttaatcataaggaagtgataatacattgcagattgtagacattctaaaaagaaatcaagtggactggactttgcaaagatgtcaatttcatgaaggaagatgctctgaattaaaggatattaaatagatttggtgagtaagtatgacagatgttccttcagttgatcctagattttaaaatttataaaaggacattactgggataattgggagaaatttggatgtggactgtatatttgataatattcttagagaattgtgaaatcacttgggtaatgtgggcaaagggttaacaaaacattttctaatgttctgtaattaaacattaaacagaatgggaatcccattctgcatgaggatgtactcttaggctaactctccaatgctgcttccctaaaaacagaatgtgtcaactatgttaataagtttcattatttatggtaacaatgaccctgattggcaagttgcacctcggactgtggactaggggctagatgaagagaacaccatatttagggtttctttgactacatttctttttaaaagagcatatccttgaaagaccctggaaacgatgactaaagaatcctcacaccagatattgtaccaacctttggagccagtctttttttttttttttgagaaggagtctcattctgtcaccaaggctggagtgcagtggtgcgatctcggctcactgcaacctccgactccctggttcaagtgattctcctgcctcagcctcctgagtagctgggattacaggcatgcaccaccacacccggctaattttttatgtttttggtagagacagggtttcaccatgttgaacaggctggtctcgaactcctgacctcaagcgatccacctgccttggcctcccaaagtgctgggattacaggcatgagccaccgcgcccagccaaaccagtcttcttaagtcaggggaggcccacactcctgccgtgtggatctcatttcctagcacttgagctctagcacctgtggaaaagagagctcctggaaggctgtctcatatgcatgaatcactgcagccatgccacagggtgctgagcaccaaatacccaagaacaactatagttatatatatatatattataaatatatacttaggttaagagtaaatatcagggccagttaccggggctcaagagtgtaatcccagcactttgggaggccgtggtgggcagatcacttgaggtcaggagttcgagaccaccctttgtattttgtaaaaatacaaaaattagccaggcatggtggcacacacttgtaatcccagctacttgggaggctgaggcaggaagatcgcttgaaaccagaaggcagaggttgcagtgagccaagatccatcactgtactccagcctgggcgacagagtgagactgtctcaaaaaaaacaaaacaaaacaaaaaaaacagagtaaatatcagtcataagggagaaagcatatgatgcaatgactatatatttcataatatgattacagtgaaactaaaaattgggaggagactgggcatactaaaaaactgttttcagtaatcatttaggtagtaaagctgttactaatgttctaagaatgttttatgtgtcataaagaataaaggaaatgactgggcatggtggctcatgcctgtaatcccaacactttgggaggccaaggtgggcaggtcacctgagtttgggagttcaagacaagcctgaccaacatggagaaaccccatctctactaaaaatacaaaattagccgggcatggtaccgcatgcctgtaatctcagatactctggaggctgaggcaggagactcgcttgaacccaggaggcagaggttgcgatgagccaagatcgcaccttttcactccagccagggcgacaagagcgaaactctgcctcaaaaaaaaaaaaaaaaaaatagaataaaggaaatgaatacttgcatggtattttaattttatcatcactggagtattggagaattggtactaaggaataagagatacagatcaaagacagaaaatttcaattaaacaccatttagttctaagtttggccaggaagttgccatataaactcattaggtaatttatttttatgtaaatatgtaaacacatacatatatgtatacttagagtttttttttgttttttttttttgttgtttttttttcttaagacggagtgtcgctctgtcaccaggctggagtgcagtggcccgatctcggctcactgcaacctccatctcccggattcaagcaattctcctgtctcagcctccctagtagctgggactacagaccagtgccaccacgcccagctaatttttgtacttttaatagagacggggtttcaccatgttggccagaatggtctcgatctcttgacctcgtgatctgcccgccttggcctcccaaagtgctggcattacaggcatgagtcacttttttttttttttgagacggtgtctcgctctttcacccaggctggactgcagtggtgctatcttggctcactgcaagctccacctcccgggttcacaccattctcctgcctcagcctcccgagtagctgggactacaggtgcccgccaccacgcccgacaaactttttgtattttttgtagagacggggtttcactgtgttagccaggatggtctcgatctcctgacctcgtgatccgtctgccttggcctccgaaagtgctcagattacaggcatgagccactgtgcccggccttttttttttttttttttttgagacggagtttcactcttgtcgcctaggctggagtgcagtggcatgatctctgttcactgcaacctctgcctcctggattcaagtgattctcctgcatcagcctccccagtagctggaattacaggtagccgccacaatgcctggctaatttttgtatttttagtagagatggcgtttcaccatgttggccaggctggtcttgaactcctgacctcaggctggcctcccaaagtgctgggattacaggcgtgagccaccacacccagtcacttacagatttttctatctttaactggtaaaaagcctataacaatcttcaaccaagaaaaatgggcacttctagaggctagactgtggccttaaaataccatttcccactaaaagaacccaatagttcacaaacttatggctgactaaaggcttggtacaggaaacgtacaagataagcctgcaacactttgtcatatcagatgggagaaggctggcaataaaataaccgtctaaatctgggagtggtggctcatgactgtaatcccagcactttgggaggccgaggcaggcggatcacgggaggtcgggagttcgagaccagcctgaccaacatggagaaaccccatctctactaaaagcacaaaattagctgggtgtggtggcacgtgcctgtaatcccagctactcgggaggctgaagcaggagaatcgcttgaacctgggagacggaggttgcagtgagctgagattgtgccattgcactccagcctgggcaacaagagcaaaactccgtctcaaaaacaaaaacaaaaactgtctagttacctatgaaggatcctaggggccaggcacggtggctcatgtctgtaatcctaacattttgggaagccgagtccggtagatcatctgaggtcaggagtttgagaccagcctggccgacatggcaaaaccctcctctctactaaaaatataaaaattagccgagcatggtggtgcatgcctgtaatcccagctacttgggaggctgaggcaggagaatggcttgaacctgggaggtggaggttgcaatgagccaagatcacaccattgcatttcagcctgggcgacaagagcaaaactccatctcaaaaaaaaaagaaaagagaaaagaccaaatattgatcagcctttattttccaaatggtatcagtagttaccaaatagtaggtgatgtaaaaaattgtttatatttgtacataataaatgaaaaataaatgttagaattagaatatgaccattttggaatgtctgatgaattaatacatccaggcattgagcataaatgactgctaaaaatcacagagagacaaccagaaggtttatgctgagaacctaaaccattcactcccacactcagccttgaaacagagaagtggacctaccaatccccctacaggtagcttactctctccataaacacatcccactgttttcctcagcacaattttactgttctggaagtttcttgcaaaggcaaatggcttcattgttcattactggaagttcctgaaagatccatcaactcttaaatggcaaacatcaacagtttgtactctagaaaattttcaattcctaacctcaaaattctaacctagctgtttccactaattctccactgtggtgtcttcatctttacctaatcctaatcaagtccccgcatgaagaccagccttaaaccaaacttttaattctcagtaaaagccatccttgcccttctgcctctgagatactatataaagctcttcagaggtggtgttttcctttaacacagtaaaccataagcccagctctgtctggtatgaggggagcaggaaaagtgccaacatatgatgcatacaatactgcccaggaagttgtcttgcaataaaataaataaaataaactgaatcaaaatcgattaagtgtaacagtgaaataaatctagcatagctgactccatcttacttctaacctcacaagctaatggcgtttgctcataactgcacgctggccaagttaactatgggagtatttaatttatactataactttaaagcaaggataataatccctttccaaaactattaataattctcaaggagatagggagggtgtacatacaagtaacaacgttatgttaaagatttataggagcattgtgacctgaccgaggacaacgttgtgcaaccttctcggacccctgctgacacccagatatctgtagtcgccagtcacctcctgacctcaacctcctcctagttcccccttcgccaacataaaaaacggcatgagattcattcctttttttttttttgagacggagtctcgctctgtcacccaggctggagtgcagtggcgcgatctcggcaaactgcaagctccgcctctcgggttcacgctcttctcctgcctcagcctcctgagtagctgggactacaggcgcccgccaccacgcccacctaattttttgtattttttttttagtagagacggggtttcgccgttttagccaggatggtctcgatctgctgactttgtgatctgcccgcctcggcctcccaaagtgctgggattacaggcgtgagccaccatgcccggcagagattcatgccttttaagatggttctttaggacattagcctgccatcttctcgctttgctggctctctgaaataaagttccttgccctaacaccttacctcttgacttactggctgttgtgcagtgagcagtataagctctggactcagatacataagcctcttgacccctctacttatttagaggatatagaggggtcagagaacatatttaagcaaatctcagggatggcatcagcaaaaaatagaatggaagatgtttcttcagcaaataaggggttaagaacacaaagaaagatgaagacaaaacttagagacttgcgaaaacttaaaaagacttgaaattggagaaaaaataaaaggaaggaacttattaccattaaaatcagaatagtggttacacttagcaggaggaaggagattgtgactggttgcagacatgtggaggacttcagaatcaactagaaactctctccttgtttagaaatactgcttggagggtataaaataatcttgtatgtcattattataacctttctgtaactctaaaattatattaaaataaaaaaaaatttttaagttttaactcctgacacggctgtggtgacatgattgtttaacttgtaagactcagtaagctactcatgtgttatatgttgttctctgaatctgtctaatgtttttaaaaatgccttgaaaacaattacatcattggttctaatccttcttattcccaaaaattcaaattcaacaatacctcatgtgatctgactacgcctaacaatgtgacctcatttctcgtcactctcctcttaggatctctattctggtctactttggtgctcctcaaactcacatagctctctctattaccctcccttgactatccatactccttccctccaatgcttcagccatctccttagccttctaagctctttattcagcttggaatattcttccccagataaacacatggcttgtgaccttataccatgtctctttccaaatactactgccccaaagaagctgtccccagccatctcatccaaaatggcctaacctctgcttactttctaccattgcttattccactgcctaatagtagttgtttgcctgcttattttattttatttatttatttattttttgagatggagtctctctcagtcgcccaggctggagtgcagtggcgcaatctcagctcacggcaagctccgcctcccgggttcatgccattctcctgcctcagcctcctgagtagctgggactacaggcgcccgccactatgccctgttaatttttttgtatttttagtagagacggggtttcaccgtgttagccaggatggtctcgatctcctgacctcgtgatccacccatctcggcctcccaaagtgctgggattacaggcgtgagccgctgcgcccggcctattttattttatttttgagacagagtcttactctgtcgctcaggctggagtgcaatggcgtgatctcggctcactgcaacctctgccacctgggttcaagcgattctcctgcctcagcctcccaaatagctgggattacaggcacctgccaccatgcctggctaatttttgtattttaagtagagacggggtttcaccattcaagaccggccaggctggtcttgaactcctgacctcctgagccacccaccttggcctctcaaagtgttgggattacaggcatgagccactgcgcccagcctacctgtttatttttatgtgttctttagtacaatgtaaatttccatgaggataaggaccttacatgtcttcctcatgatcactacattgatatgtgtgttgtgtgtgtgtgcaaaaggggagctggaaaaacagttgagtccaaaatacaggtaaaatattgcactaaagaaaaacgaggctgggtgtagtggctcacaactgtaatcccagcattttgggaggctgaggcaggcagatcacgaggtcaggagttcaagaccagcctggccaacatggtgaaaccgtgtctctactaaaaatacaaaaattagctgggcacggtggcacacgcctgtaattccagctactcgggaggctgaggcaggagaatcacctgaacccaggaggtggaggttgcaataagcggagatcaagccactgcactctggcccgggcgacagagcaagactctgtctcggaaaaaaaaaaaaaaaaaaaaaaagaaaagaaaaaagaaagccccatcactgaaaacaggtttgaaatataaaagaaataaggtgattggtaaatggggtaaagttgaagcttcttccatagcttatgctacgatctttattcccaaccaggttgtaggcctttgctccacaagtctgggtgccttggaggaaggtttcacaaacaacacaaaaatgtctcctttctcttaccacatgggctgtggccggccctgatggtgtcccctgccttccttacctgtgaactgtgtttcttccctcaaaatcatccagggctcttttcctcgctccagtaaatcaaccacaactggtttagaaatggaatgtcctccttataagaaaagaaatgccacatggtataaaaataaaaacaaaagtaacagaaacctttgagctttgattaaatttacaatgaactaaggacttcaaataaaagaggggtgagatgattgaagaaatgaaacaggcacagtaaaaccttattttaatgtaaactcatacacgcgtggtctcttaggagaaagtttaacctgtgaccttataaaatgtctctttccaaatattaccaccccaaagtagctgtgaagttctctggagccagaaggctggggcacaaattattcctcttaaatctaccaaccttgtgactttggccatgtgacttcaactcattattccaatttggcaaataaactggacataataatactactattggctaggcatggtggctcacgcctataatcccagcattttggaaggccgaggtgggaggatcacttgagaccaggagtttgagaccaacccgggcaacagagcgagacctcatctctacaaaaaaaaaaaaaaaaaaaaaaaattaggcatggtggtgcatctacagtcccaactactaaggaggctgaggcaggaggatcacttgagcccaggaggttgaggctacagtgagctatgattgcactccagcctaagcaacagagcaagatccagtctcgaaaaaaataaataaataaataagataataacaataacactatcacacagttctttcaggattaagttattttatatatatatatatatatatatatatatatatatatatattccccctcccttccaaagagtggctggggacataatgagcacaactgtaccaattataattattttattatttctgtatgagagaaaaaaagcatcccgactgatatataaaatcttcattcaaactcaatgcaaagctcatgaattataactttcaacaataaatcatacaaattggctacaggaaatgaaatgtggactcttcagtttccaataaatattgttcatctaatccagcactatatgtcacaggggttcttcttatactcagagtaaatcatgaatctgcgtcttttgtccctgcaggtggatcagatgatgacacagcatatctataggaattctggaaatatgcacaatgggaaaccaggattcctgggcaatggttattcatggactaataatatataatttaataataataatatataattttaacccagccccttggatattaaggaaaggaggcaatcataaggggcaggagaatatgtgactatctctaaaggatgaagaaaatgatggtgcttagtggcacagccattgtcaaacaggcagagctgaaatattcctctaagaacaggaaggagaaattcaactatgtcttgaaatatggccttgaaattcattgtgttgaaaggtaacatatcacagatcacattttaaattacttgaggcaaataaacttacccagtgataccaggtttctatagttctccaacatcacatccctgtataagtccctctgattagggtccaggtattcccactcctgccgagagaagtctatggccacatccctgaatgtcactaattcctgaaactgcaaacccatgcattacaaaattttaaaaacattttaaagaaggaaagataggagattacaagagcacattagagaaaaggagtgatatagtatatgtggctaatgactggtagcagactaaagcaacgtgtctacatattcctaaaggatcctattgccacaggatcctattcctaaaggatcctattcctaaaggatcctattgccacagacaaatgtttctgcatgttgaaggttaccacaataattcagacctgctgaggaatggataaaataaaattcaataaagtattaaagacacaactacatagtctgctagtcatgtgatgcataaattcccaataaacatgagtttctaaactatttttcctgtaagttagaaaaatgagatgtccttgccaaatttaataatctccaatatttaattgttttgtgctatttatttatttttttggggacggggtctcactcctgcccaggctggagtgcagtgactcaaacatggctcattgtatccttgacctcccaggcccaggtgattttcccatctcagcctttcaagtagttggtactacaggtgtgcaggacctgcccagctaatttttgtattttttgtagagacagggtttcaccatgttgcccaggctggtttcaaactcctgggctcaagcaatccgcctgcctcagcctcccaaagtgctgggattacaggcgtgagccactgcacctggccaatctccatatttaaaaaaaaaagcttttgcagaacatttagacatttccacaagtctcaagttacatcattatgtcagagcacataagcatttttcttaattttgacaaatatattttttattgactgtgcaacaattttataatgaatatttcagacttactccgtcgttaatccatcttttacctcgtgtacattttttaaatcttttttttttttttgagacaggctcactctgttgcccaggctggagtgcagtgacacaatcactgctcactgcagccttgacctcccacgctcaagcaatcctcctgccatagcctcccgagtaactgggactacaggggcaagtcaccatgcccagatgatttttgtactttttttgtagagatgggtgtctcactttttttgcaaggggtctcaaactcctggcctcaagtgatcctcccgccttggcctcccacagtgctgggattacaggtatgagccaccgtagctagcctaccttcatatactttgttggacagaacttcaaaggtcttccccagttctggaaatcaacatatttactccttaggataatattctcattcatcgccattttccatcacttaatacttttcttgttccagaatggatactgatataggatgactcataataaaaaaatgtcacccaagttcagcagaacacattcaaccacaaaataaaaacttgtctctcagtaattctttgacaagatccatggtatatctccaacaattctaaaattctcaaagaatatgagatctcatcacatactaagacagaccaattgataaccaaatcccatcttatttgcctagaaaactcaggtctgcggagaatgtcagagcctacctatggtatccaaataggaccaacatctctaattcaccaaactaaggacctataaaggaagctcaaatagttccctgttgagacttcactcctttactgctctatcatagactttggttgaacaataagcacatgagtactaaatacatttgacaataaatataaaagtggacagaaaatactcatagggagaaaactgagttatttgctatcactattcacaatattagaagaaagtggggacagataactgaaggaggccttcttaaataggaagccttaggttaatgaaaacatccacataacctatgatcatgatattgcaaggaaacagaattaatcaacttacacaggtcatggttttagaattgtaagacctgatcagtcctacttggtggggttccaatactggaaacattcaaactccagagaatccagagctgagagaagaaaagagatgttagtgttcccaatatgacttaatttaataaaatctttctgctcctctatttctccttccaaattaatccctcacaactgaacatataacttagggaaaaacagacaatgaatctaagcactccctcacaccccaggaaacccagctatacaaaggtagttttagagtaagtcaatggctcactaaagccagatccagacaagatagcaagaggttttctggacaaggctccaatttgggaaggctgatctagacttgagattaggctgctcagtttctccatgagaagattcacttgccttcattcccaccttccaaggctgagagaggacttatcgttcaaactagaagcttctttttttttttttttttttttttttttctgagatggagactcgctctgttgcccaggctggagtgcagtggtgagatcttggctcgctgcaacctctgccacccaggttcaagcgattctcctgtctcagccacccaagtagctgggactacaggtgcgtaccaccacacctagctaattttttttgtatttttagtagagacggggtttcactatgttggcggggctggtcttgaactcctggcctcaggtgattcacccgccttggcctcccaaactagtcagattacaggcatgtgctaccgcgcctggcctcaaactagaacctcttctatggcatcagaatcagttgaaattggtcaaaacatgagagagaacacatcacaggaggaaatgtttaggcctggttctgtgttgagcacaaactgccttgctaaatacaaaatatacatgtaatagaataccaagaagctatcagatgctaagtagggaaacgtatttaataaaatttaaaaatttcagatatactgtcaacggaaaattaagatgagaaaacagaatgtacaatatcattggatcgttaaaaagacagacaagcattgaggcacaggctataggacatcaatacattgagaaagtctggtagtttatttattctgttacattacaacatgatcatatgttaccattacttttcttttagttgctatcttgattttcttttttgaatatatttcataatcattttaacactgttcatacattaacttaaaaaatacatgtgtacacacacacatacactcacacacaaatttgtatattaaaaggtgggtttattttgccacttagccacagtgtcatccagtctactgctaaactctctctcttttttttttttttttttaaggggcagggggtcttgctctgtcacccaggctggagtacagtggtgtgatcatagctcactgcaaactcaggcttctgggttcaagtaatcctactgcctcagcctcctgagtggctgggactaaaggtgtgcaccaccatgcctggctaatttaaaaaaatttttttagagacagggtcttactatgttacctaggctggtctcaaactcctgggctcaagagatcctccctcctaggcctcccaaagtgttgggattacaggcatgagctaccacgcctggcctagtttcactttttatctaacatcacttgaagaaaaaattagacagtaaaagcttacagaatatattcactaacttccatatagattccatgagcttagttacaatgatgaccagaatctaatcaatgccacgtccacatgaattcccaaggcacatcacctgaatctctctagtggtcttcactatacactgacttacccgttcctatttacaacttatggcccttgctgaattattggcattttaaagtagtgactagtcctagccacagcaaccagacaagagaaagaaaaaaaggcatccaaattgattaagaggaagtcaaacttgctgttcgccgatgatataatcatatacctagaaaaccctaaagacttacccaaaaagcccctagatctgacaaataaattcagtaaagtttcaagatacaaaattaatgtacacaaatcagtagcattgctatataccaacatcggctaagctgagaatcaaatcaagaactcaacctcttttacaacagctgcaaaaaaaaaaaaaaaaccacaaaagaaaacaaaaacaaaacaaaacaaaacaaaaacaaacaaacttaggaatatacctaatcaaggaggtgaaagatctctacaaggaaaactacaaaacactgctgaaggaaatcatagatgacacaaacagatggaagcacatcccccgctcatggataggtagaatcagtatggcgaaaatgaccatactgccaaaagcgatctataaattcaatgcaatttccatcaaaataccatcaccattcttcacagaattagaaaaaacaatcctaaaatgcatatggaacaaaaaaagagcccgcatggtcaaagcaagactaagcaaaaagaacaaatctggagacataacattccctgacttcaaactatactacaagacaatcgttaccaaaacagcatgggactggtataaaaacaggcatgtagaccaatggaagagaatagagaacccagaataaagccaaatacttacagccaactgatcttcgacaaagtaaacaaaaacataaagtggggaaaagacacactattcaaaaaatggtactgggataattggcaagccacgtgtagaagaatgaaactggagcttcatctctcaccttagagaaaaatcaactcaagatggatcaaagacttaaatctaagacctgaaaccataaaaattctagaagataacattggaaaaactcttctacacattggcttaggcaaagagttcatgaccaagaacccaaaagcaaatgcaacacaagtaaagataaatagatgggacttaattaaactaaaaagcttctgcacagcaaaagaaataatcagcagagtaaacagacaacccacaggataggaaaaagtattcacaaactgtacatccaacagaggactgacatccagaatctacaaggaactcaaacaaatcagcaagaaaaaaacaaataatcccatcaaaaagtaggctaaggatatgaatagacaattctcaaaagaagatatacaaatggtcaacaaacatatgaaaaaatgctcaacatcactaatgatcaggaaaatgccaataaaaatcacaatgtgataccaatttgctccctaagaatgaccataattttaaaaaatcaaaagataatagatgttgccatggttgtggtgaagagagaacacttctacactactggtgggaacaaaaactagtacaaccactatgacaaacagtatgaagattccttaaaaaactaaaagtagaactaccatttgatccagcaatcccactaatgggtatctacccagaggaaaagaagtcattatataaaattattttatttttttttcagtgatagagacaggagtctcaccatgttggccaggctggtctcgaactcctggccttaagtgatctgctggcctcagcctcccaaaatgctgggattacaggtgtgagccactgcacccagacagaagtaattatatgaaaaagacacttgcacacacgtttatagcagcacaattgcaaaaatatggcaacagcctaaatgcccatcaacaagtggataaagaaaatttggtgtacgtacacatatatatacactatggaatactactcagccataaaaaggaatgaaataacagcattggatgcaacctgaatggagttggagaccattattctaagtgaagtaactcaggaatggaaaaccaaacattacatgttctcatttatgagtggaagctaagctatgaggatgcaaagacataataatgatataatggatctcaggaggctgaggcaggggaattgcttgaactcaggaggcagaggttgcagtgaaccgagactgcgccactgcactccagcctggccatagagcaagcctttgtcataaaaaaaaaaaaaaaagccggtcgtggtggctcatgcttgtaatcccagcactttgggaggccgaggcgggcagatcacgaggtcaggagactgagaccacggtgaaacccagtctctaataaaaatacaaaaaattagccgggcgtggtggcgggcgcctgtagtcccagctactcggagaggctgaggcaggagaatggcctgaacccgggaggcagagcttgcaagtgagccgagatcgcaccactgcactccagcctgggcgacagagcgagactctgtctcaaaaaaaaaaaaaaaaaaaaagtaatatttaagaggtggtctcttgaagtaactaatacaaattctgttgttagtcttttaggatatgactttcagatttaagctctgatacttaataaaatgtgtcttaaagtctcattggtaaattgggagaaaatgtcatttagcatataaaatagtctgaagatgaagtaaaataatccacataaggctgggtgcggtggctcacgcctgtaatcccagcactttgggaggccgaggcgggtggatcatgaggtcaggagttcgagaccagcctggccaagatggtgggattacaagcatgcaccatcacgccagactaatttttgtatttttagtagtgatggggtttcgtcatgttggccaggctggtctcgaactcctgacctcaagtgatccgtccgccttggcctcctaaaatggtgcgattacaggcgtgagccaccacacccggccaaatatgagaacgttaatgagattcagctcaatggctcccaacatctactggaaagaaagcagattggtattaggacattcagacacatttcagatgaagtaaaacatactctaaaaccagtaaccttaggaaagaaaaaagccaactagcctaaacattgagttttagatgtgaaagaatttttttcctcctcattagagtccttttgaggaatagcaggaccagggagggagaaaaaaatcatgagttatcaggcctttccttgaagcacggaatgcctccttacacaataccctccacgccttccctgttcacacactttaacacatggaggtaggagagaggctggaatctgggtatgagttcacagcaggttcctggggtcagagctctgggaaagacgaggttctgagacaggtagctcgctctcagagctcacaaagaaataacctcccaggcgtttccaatctcacagcaagtcaatgccttcttgctggaaaacttgatgtagagttcagtatccaacttccctcttgcagacattttttgtgtgtgtcagccgcaagcagctgtgaggagggaggagagaagcagcagccgggaacctacagccaagactcaaagtgacaccgcagtgccaccgcaatcaacgtacatgaaaaggacaagcacctcatatccccgtcacgcaagcacagccactcactcacctgtcacagcctcacaaccgcacccaccgtcaaggaggcacatcccagcctctcacacgcagtttctctgtcacacactctcaaacattccccatctgacatatacaacattctctcacgtgcgcactcaaataccctcctctgctgttcatgcacccacgggcctgagattccgataacaactggccgtccacactagaggcttccacggttaaagggcttcctccaccaccccggctggtttaggttgggctccaacgtaacttgattgcccagagccctccctgcgagtactctgtgcctgttatatactgaaatgagttcaacccaccttgcaaaagaaccacgcgaaaacggaagggaagccatagattgggtgttcccgttgccctctgggaaatgtagtttaagcctaaagctccatgaccgcggtggcttgtgggaaaagtggctcggaaccccaaatcccggttagattgcaggcaccgccggacgctggctcccggaggttttagttttccctctaccaggagtgtgaagacacagagacttattgcgctggcgaagatggctgaggcgaaggcgtgtccgacttgtcctcggagttctgagggtttcagtgaccccagaaggctgagaagtggaatccgaactcgaggctgcccgaagcctcgggctgtttgagtgtagagccggtaggggagggctttcaaagtgtggccgcgagggcgagcgtgggggatcggttatgagctcccgagggcggggactctgctctgtgtcccctgaggaagtccagtcttgttataaggtatgagaaaagtaactttttaaaaatggacaaataataattgtatgttttatatactgatagggtacaatatgctgttttgatctatgtttacaatgcgaaatgattaaatcaagctaattaaatccatcacctcacttttttgtggtgaaaacatttaaaatctacttttagcaattttgaaacatgcaacacattatttatgtagttgctattctatgcaatcgattaacaaagtttatttctcctgactaactgaaattttgtactgttttaattaacatctcccttttccccatttttcagtctctggtaaacaccattctttgcctcttaagagttagacttttttagattccacaaataccacttatgtggtatttggtatttatctttctgttactggcttctctcacttagcataatgtcctcctggtttatccatgttgtcacagatgacagaattttccttgttttatttttattttttatttattttttaaaaatctatttacttattattattttttgaaacggagtttcgctcttgtcacccaggctggagtgcagtggcacagtctcagctcactgcaacctctgcctcccctgttcaagcgattcttgtgtctcagcctcccaagtagctgggattataggcatgcgccaccacgtcggctaatttttgtatttttagcagtgacagggtttcaccatgttgatctggctggtctcgaactcctgacctcaggtgatccacccaccttggcctcacaaaatgctgcatttacaggcgcgagccactgtgcccggccgattttcctcttcttaaaaagtgaatagtattcctttatatatacatatatatatgtgtataaggttatatacataatatatataatatgtaacattttctttatccacttataacatgctggacacctaggttgcttccgtatccaatgcagaataatgctgcagtgaatggtagtgcagttatctcttcagcatgctgatttcaattcctttagctatacacccaccggtggggttgctggaacatatagtaattctatttttagtttctgatgaatctccatattattttccatcatggctgtattaatttacattgggaaatgtacgtacttttgatgttgttgtgaatggactggtttattcaataaattgtgttaggtacattgactaatagtgtgtagaagtaaagttatatttacttaattcttaaaggtatagtcaaaacagactgaataattaaatgtaaaaatgatctggagaaaacctttttttttttttttgagatggagtctcgctctgttgcccaggctggagtgcagtggcgcgatctcggctcactgcaatctctgtctcccgggttcaagtgcttctcctgcctcccgggttcaagtgcttctcctgcctcagcctcccaagtagctgggattacaggcatgtgccaccacacctggctaattgtatatgttttaaaaaattaacttaggaatagattttctaagctaaattgaagggaaatgctaaggaaatagtgagattttacttgataattatgtgtctgaatgaatcagccaattaataaaattaaaacagacctcgggccatggtgcatgcctgtcatcccagtactttgtgaggccaagacagagatcgcttgagtccaggagtttgagcccagcctgagcaacacatcaaaacgctgtctctacaaaaaaatacaaaaattagccaggcggggtggctcatgcctgtagtccccactacttgggaggctgaggcaggaggatcacctgagcctggagaagtcgaggctgcagtgagctgtgatcgtgtcactgcacttctagcctgggcgacagagtgagaccctgttccagagaaactaaaataaagtgaaatgaaaacaaatacaagacaaaaattgatcgacttattttaacacatagtatgatgagagacatagataacagtactaacccggtgtgtttctgttgatcaaagtcacggtcactagtctaaaggaaataggaatagtgactataaattcacaaccatttacaacattagaaatactaattatcttcagatatatcagactcacaattacttgcccttttaagaattcatcctgttctccataaggaagaaagtattgataactctttttttcccttaacttagcactttgtgcttctgaatctctgaatttgtgttcacatcttaacacttttttttttttgcaattattttctgtagctttttgtcttcagttgagacatctcctatattctctttacacttttccacaaatgacccaatttttttgtaagcatcattgatgagttccatgtatgtgatgacggtgtaatgataaattatcaatgtggtttccctccagtcttgttcattattcaagtgactctccttggctgagcaacaggccaggaggtatctatgacattttgttcaggttaagcagtaagaataaaacaaaatcgacattatctttttcatattttaaacacaagccaacaaataatttggaaggacccatgattagacaatgaggattttatgctccctcaagagtaattgagattgtttaattgtatggaggaatgaacatatcttaaagggaagcaagaagatataatatttagatcacagaatcattaggaagcggctttgcaccctggctacaccactgtacacaggaaatatcagggcaccgtggcgcacgcctgtaatcccagcactttgggaggctgaggcaggtggatcacctgaggtcaggagtttaagaccagcctgactaacatggtgaaaccccatctctactaaatacaaaaaaatagccgggtgtgttggcgcacgcctgtaactccagctactcgggaggctgaggcaggagaatcgcttgaacctgggaggcagaggttgcagtgagctgagatggcgccattgcactccagcctgggcaacaagagcgaaactctgtctcaaaaaaaaaaaaaaaatcactgccacaaactttttcacataggacgatgaaggattccagagccccttctacctctaggggctcctaccgctgccatcctacccctgccgtaccacacatatatcttgacagggcctgttacagagaagaaaaggtccagtaaattaatactacagtcattgacacataaccaccaaaaaactcaaattaaaattttgacaaaattaagtgtcagcaagaatgcaaagatttgggaattatcagacattgtaagactgtcagttggtgtgttaacattgggatgaagccaataatacctagtaaaactgaagatatgtttaccatgtaacctatggttttacctcttgctttatactgtacataaatacacactaatggtaaccaaatagaaatacaaaaatgttcacaacggcatcatttgtaactgaaaaaatgaacacaacccacatgtccaccaaccatgaagggatacacactggtgtactgttttttgtttgtttgtttgttttttgagacacagtctcactctgttgcccaggctggagtgcagtggcacgatctgggctcactgcaacctccacgtcccaggttcaagtgattctcctgcctcagcctgccgagtagctgggattaccggtgtgcaccactactttcggctaacttttggttttttgtttctttgtttgctttgagacggagtctcactgtgtcgcccaggctggagtgcaatggtgtgatcttggctcgctgcaacctctgcctcccgggttcaagcgattctcctgcctcagcctcccgagtacctgggactataggtgcgtgccaccacacctggctaattttttgtatttttaatagagacagggtttcactgtgttagccaggatggtcttgatctcctgacctcatgatccgcctgcctcagcctcccaaagtgctgggattacaggcatgagccaccacacctagctggtgtactgttttaatggaatgcagaatcgatgctaaatgtgaatattaaatacttaatattgagtaatagaagccagatgcagcaggatacagactattactccaattatgtaagagagaaaccaggcaaaatcagactatactttaggcatataaaaaatacataataaggctgggattcatgctaaatgagtagattttagcttcccttgccacacgcaaacaatgtgggtatctgtgagatgatagagatgttaatttgcttcactatagtaacccctttatactatgtatatgtatcctataacatcatgttgtgtaccttaaatatatagaataaaatacatttaaaaaaagaaaaagttttggctgggtgtggtggcccatgcctgtaatcccagcactttgggaggctgaggcatgaggattgcttgagcccaggagttcaggaacagcctgggcaacatagtgagaccccatcgctatcaaaaaagaaaaagaggccaggcgtgatggctcatgcctataatcccagcacttcaagaggccgaggcaggcggatcacgaggtcaggtgttcgagaccagcctggccaacatggtgaaacctcatctttactgaagatacaaaaaattagccagggatggtggcgcacatctgtaataccagctatttgggaggctgaggcaggagaactgcttgaacccaggaagcagtggttgcagtgagccgagattgcgtcattgcaccccagcctgggcaacagggcaagactccgtctcgaaaaaagaaaaaagaaaaagaaaacaaaattatgaaaagatgcacaacaaaattaaaatgttgactctaaagagctactgaatgacgggggtgcatgagagaaaaggttacttaacatttttatacctattgaattgaatcctatgtatgcattataaatttaaatgtgcaataatgcagataactgaaatgtgggtatgctttgattaggactttgcatttcccatttgctcaacttccttatgattctagatgcatatgaatagaaatacaaaatttaaggagccacaggactcttatagccctttcttctttccatattttgtgtctctggctgtagtttgccatatgtgtccctatggctaatgagcaaaatatttttcagttggatacctgtgaccaagcattgcaagttaaagatatttctgaatcttggaccctcttagttacagtaaagcccggccatgcataataaagcagagaggaatgtaaaaggttgctgcatcgataatcaatttctggtgagcaataattataggtaatgtaaaatgagacaattattgcttttcatcatatcttgaaagaactcctacagtcattgattttgaacaaaacaccaaagttcactctcctcttttctataatgaaaagacattatccagtagaagttcaagagtaaaatctgaaggcagcttatctgacctggccacatggccttgccacttattcaacataactttctacacactaacctctccagacctcagatcttcaactctctgaaatacaaacatagtagtatctacctctagaactgcagctgaactgagcattttagggaaggaacaaacacacatgatatagatagtcagattatgaacccagcgtagcccagaatacagaaatttctcagtaatagagaccctcaggagaaaaatcagatgtagcctatctcagtggtctttcatgtggcaaatgaaaagtgaaagtccataatgagaaagacatgggcagccaatgataccatcgattcagtgtagactctcaacatatctgacagtcattgcctgttgtaccccaacccgtttatattttgggtttatatcacctttcagttaaaacatacataaacctgaagcctcagtcagaaatatttatggataaccaggtattattctgtgtttccagtcaaaactcaggtagaccacattttatgtgacaggagaaggcacagttgatgcccaattaaccctaagatcatctctgcctgcagcttcctatcatcacagcaagctcttttcctgcagtccatcatctgtgtctgccctttgctatataggtagcaaaaataggcatctgaaaagatgctcaacaccatatgtcactagggaattcaaattaaaacaacgatgagataccactacacatgtattagactggctcaaatccaaacgctaacaccaccaaatgctggtgaggatatggagcaacaggaactctcattgattgctgctgggaatgcaaaatggtacagccactgtggaaggcagttttgcaaattcctgcaaaactaaacatatgcttaccatatgatctggcaattgcattctttggtatatgcccaaatgacttgaaaacatatctactcaaatcctccacatgaatgtttacagcagcttatacataaccaacaaagattggaagtaaccaagatatcctacaatagggaaatgcataaactaactctgaaacaatcatacaatggaatattattcaggaataaaaaaaaatgaactaccaaggcatggaaagacatggaggaatcttaaacacgtatttctaaatgaagccaatgcaaaagggccacatagtgtagagttccaattatatggaatactagaaaaggcaaaactaggcagatggtataaaaagttcagtggttgccagaggcttgagcagagggaaggatgaataggtggagcacagaagatttttagggttctgaaacttttctgtgtgaccctatgatggtggacatatgtccttatgcatttgtcaaagcccataaatggtacaacacaaagagtgaatcttaatataagccgtgaacttaataatatccatattggctcatcaaggataacaaatgtaccatactaacaagatgataatagaggaagtgtgtgtactatggtgtgagggggatattagagctcaatatgccctctgctctgttttctgtacacctacaactgttctaaaaattaagtcaattatttatctatcttttgcagacaaggtctcgctctgtcactcaggctggagtgcagtggtacaatcacggctcactgcagccccaacctccagggctcaagcaatcctccccacctcagcctcctgagtagctgggaccaccagcgtgtgccaccatgcacggcacatttcgtaggcatctgaaaagatgctcaacaccatatgtcactagggaattcaaattaaatttatgatgagataccattacacatctattagactggcttgaatccaaacaccaacaacaccaaatgctggtgaacatacggagcgacaggaattctcatctattgctgctgggaatgcaaaatggtacagccactgtggaaggcagttttgcaagttcctgccagactaaacataagcttaccatactatccggcaaaaaaaaataaaaatttaaaatatgttttatatacttaacaatatataaagaaatatatattttctatatattttaaaaataattgttttaaattttttgtagagacagggtctccctatgttgcccagcctgcagaatctattaatttaaaaaacgttttaaactcttgaacaaggaattatttgaagagtgaaaaataaaatgatagaatattgattgataaattccaaatgttgaatattaaataatttggattaattttaaattccgaaaagcaaaactttaaaaaatatttttaaaatgtcctaatcccatgtcaatgcatgttcaacaaattcaagagccaatttcagagaagaaataagtggtcaacaacaagttcttaggttttgactttatttgttgactatttgtatttgtgaatggcgaagtttagattttgtttctttcttcttagggtattgactaataattttattaagccagagagacagtaaatagaattattatctatttgtccattttatctgttataaatatttcttccaaactcacttatctaaagttttcgggttttttagctggcgcagtggctcatgcctgtaatcccagcactttaggaggctgaggcaggaggatcacttgaggtcagcagttcaagaccagcctgggcaacatggaaaaactctgtacctactaaacatacaaaaattagccgggctgccaggcacagtggctcatacctgtaatcccagcaatttgggaggccgaggcaggcagatcacctgaggtcgggagttagagaccagcctgaccaacatggagcaacctggtctctgctaaaaatacaaaatttttggccgggcgcggtggctcacgcctgtgatcccagcactttgggaggccgaggcgggcggatcacgaggtgaggagatcaagaccatcctggttaacacagtgaaaccccgtctctactaaaaatacaaaaaattagctgggcatgatggcgggcgcctgtagttccagctactcgggaggctgaggcaagagaatggcctgaacctgggaggcggagcttgcagttagcggagattgcgccactgcactccagcctgggctacagagcgagactcggtctcaaaaaaaaaaaaaaaaaaaaaaaaaaaattatccaggcgtggtggcgcatgcctgtaatcccagctacttgggaggcagaggcaggagaatagcttgaaccccggaggcagaggttgcggtaaactgagattgcgccattgcactccagcctgggaagcaagagcgcaactctgtctcaaaaaaaaaaaaaaaaaaaaaaaagccgggcacggtggcgcatgcctgtagtcccagctactcgggaggctgaggcaggagaatcccttgagcccaggaggcggaggttgcatgagctgagatcgcaccactgcacttcagcctgggaagtaaaaaggtttttttcgttttgttttgtttaaactgttttttttttttaccattcagatatatggaatgtttatagatatctaccaagataaataattaccatatcaaggttctaaattttaaaaaatattttttccctttgttacgtttaggaagcctattccaggccgggggctgtggctcacgcctacaatacctgcattttgggaggctgaggccgggggatgatgaggtcaagagatcaagactatcgtggtcaacatggtgaaaccccgtctctactaaaaatacaaaaattagctgggcgtggtggcgcgcgcctgtagtcccagctactcgggaggctgaggctggagaatggcttgaaccagggagtcgcaggttgcagtgagccgagatcacgccactgcaccctagcctggcgacagagggagactccgtgtcaaaaaaaaaaaaaaaaaaaaaaaagaagaagaagaagaagaagatggccgggtgcggtggctcacgcctgtaatcctagcactttgggaggccgaggtgggcggatcatgaggtcaggagatcgagaccatcctgcctaacatgatgaaaccctgtctctactaaaaataccagaaaaaaaaaaaaaattagccaggcgtggtggcgggcgcctgtaatcccagctactcgggaggctgaggcagaagaatggcgtgaacccgggaggcagaacccgggaggcagaggttgcagtgagctgagatcgcgccactgcactccagcctgggcaacaaagcgagactccataaaaaaaaaaaaaatcctattccaggccagccgggcacggtggctcacgcctgtaatcccagcactttcggaggccgaggtgggcggatcacctgaggtcaggagttcgagaccagcctggccaacatggtgaaaccccatctctactaaaaatacaaaaattagccaggtgtggtggcggatgcctgtaatcccggctacttggaaggctgaagcacgagaatcacttgaactcgggaggcagaggttgcagtgagccgagatcgcgccattgcactccagcctgtggaacagagtgagactccgtccctaaaacaaacaaacaagcaaacaagcctattccaaaacaaaaataatgaaagtatttatttctttggatgtttttaaataaaatttttaatcatatgtattcgtgtccaaaggtgaagaacataatgtattgaagaatgtggtgggacttaagtcactcctataggacctgagtccatttacctaacccttttcttttacccgagtcaggttccacccagactcgcctcctactggcgctgagaacgcagcgactccacccttagcctcaggtcgggggccccagcatttgtctgatctgcgcttgcgtactcctaggccaggtggccactcccagaggtgtcccaggctcgcgcggtgggcggggcgcgcggtcctcgtggtcacatccgtatttcctgtaggtttttaggactctggactccacttctcagggttgcctgcggtcctgactgttccgtcttggactacatattccacgggcgacggagaaatcttgtacctctggctccgtctcctggacctctgcgctgcccgtgacctggtcccacctgaggaagaaggcggcgcgggtcgctgccggagcttctgcagccccagcccgcagcccgcgcgggaccctgggtggcggtgagagtggagctgcaggaggcactcagagcgcggaggcctcgggcgcgggccggacttgtctcccacctactcaggccttggggtgctggagctgcgaaggaaggggctcatctctagggagacaggtggagaacgtctcctttgtgacgtggagactgagaagggtgcgtgaatgtgttgtgtgaccgggacatagcgtgagtgtcctttgaaagcgtgctttgctataactctgtggtgtcactgacccgtgggtcagggtctcagtttccctgtctcctctcagcctcgtatgactgccacagagaaatgatctaagcgcaaaatcagatactgagccttagatgaagttttccagtgagaagaaacggataggatgggaagcttagagcaggaattcccttaagacggtgtgatagactcttttaaagaaaaaatattcagtctttaacactcgttaaagcatgcaaaggaagactttattcaggatcatcgtgataggtattggaagcacagcagtgagattttgcaatgggtacaagagattgggttcaactccaaattcagcatgaacgagtaggaatttatagtcaaggagcaggttagggatcactggatgacaaaatactaagaggaaatgtctgggataagtaggattctggctaaacgcacctgttgggattctttctgaagagagagacctggatgataagacatcatcgcctgggggatagtggaggatgaagatggggggcagagggttcttgctaaactgacttaaaaggggcctttgttattgttggattttataatgaagtgtacagatgggcccaggggaaggtgtaagagcctgagtaaagtttggtcacgcagggtttgtgtaggattccttcctggaagggttgtacactccgcccccatctcccggttcttggagtttcatttacgtgtttaagaatcacgtggatggtgaaccctgattctgaagtcggtgtctgctgtgttcatggcaggattcggttaggaggaacagcacagcatgctgggctctggatttaaagctgagcacttaagagtgaatttgagattagtcataaatcgccttgaactattggaggaaaaaaaaaaaaaacagaactggcccagaaagcaaggaaggagattgctgactatctggctgctgggaaagatgaacgagctcggatccgtgtggagcacattatccgggaagactacttcgtggaggccatggagatcctggagctgtactgtgatctgctgctggctcggtttggccttatccagtctatgaaggaactagattctggtctggctgaatctgtgtctacattgatctgggctgctcctcgactccagtcagaagtggctgagttgaaaatagttgctgatcagctctgtgccaagtatagcaagtaatatggcaagctatgtaggaccaaccagattggaactgtgaatgacaggctaatgcacaatctgagtgtggaagccccatccaaaatcctggtggagagatacctgattgaaattgcgaagaattacaatgtaccctatgaacctgactctgtggtcatggcagaagctccttctggggtagagacagatcttattgatgttggattcacagatgatgtgaagaaaggaggccctggaagaggagggggtggtgggttcacagcaccagttggtggacctgatggaatggtgccaatgcccatgcctatgcccatgctatctgcaaatactcctttctcatatccactgccaaagggaccatcagatttcaatggactgccaatggggacttaccaggcctttcccaatatttatccatctcagataccagcaactcccccatcatatgaatctgtagatgacattaatgctgataagaatatctcttctgcacagattgttggtcctggacccaagccagaagcctctgcaaagcttccttcctgacctgcggataactatgacaactttgtcctaccagagttgccatctgtgccagacacactaccaactgcatttgctggtgccagcacctcagcatctgaagacattgactttgatgatctttcccagaggtttgaagagctgaaaaagaaaatataggtctcttaaaccaggcaactttcatattctgggagttgagactgagcaatttctccttgtaacaaagaatctccatgaaattccttttcatctgttaaccgtcactgagcacaacactcctcctctgggctctctgcctgctcctccagattctgctgctttccagttctctgttgatcctgagactaacaaccggagactgaggctggagcaactggctcctggcagctgtgcttgtcccttttctgtcagagtgatcccaggtttcctcctggcccgtcccatggtccctccacaggagcataagaggatgggaaagcactatggggagaccaccaaagatggctggacagtgggagagagcacgtcgtgaagcatcccagcctcgtgttgaggttccagacttagaaacaaacccctctgtacagggggattgtggtgagtgagaatcaaggccacggtgtgtgttttcgcactcgaatgcaagtgggagagagaaaatgactcaggacgccattgtaacggttcctggaagctgggccctctcattggcatatacactactcctcgccgcagggcactgtcccaccgggatccagttgcaaagtttgtctcgacagtttaaggcctcgcttagttgtactggattctcagggagtcctctgtggccttttgctctgagtgctgtttcccttgtaccagagggcagcaccatggaaattctgtttttcctgtagcatattgtgttggattgccttactggcagagaaaggacaaattgccattgaagtctagggtgggcttccagctgccttaatagaagtactcaagtcttttgggtagtgagctggaaagcctacaggaaaaaaggggtacctgttttcatttgaaaactttgattcatggaaactttaaaactaatctcagataaatttttggtgcaaatgtggctgtagttgtccactgctttcctggatggatgggactcttatgtcataacttctatactcctttggcccatagctaaggtcatccttccccacaggggtggctttgggattggattatacagcttttgcttctgtgtagtatacctgtacatacctgtttcaggaagcctttctttaatgttttcagttggtttgtattctgtagctcagtagctgctaataaagttaaagatcctggaaaaaaaaaaaaagaatcacggccttcttgaattctgactctaagaacctgcagtgaaggatgactagagatttcacctaccatacttccttctggttatgtgtatgaaattatgcacctgtagccttggagggggaaacagaaacactatttcgaggagtttttggatcgttccgttttggatttctgtagatcaaaagcaataggaatatgaactcagttgtgatgtgttcgtgcaaatgaaggaagtgagccggaaatttaagtgccccaaaataggaattcttagtcattgggtccattgtctgtttttacgggcatacagggcaccacaatccccctgaaactttatatacatgtttgttaatttgcatttttccagggttccatcttccaaattatttagacttgagctttagacctggaatcagagtgttatacctttgaatggttttgcagaaaactaatgatcaagattatgagaatggttaagaaaatcatacaacatccatgggattggacattatactgataataaaatttatgtttataaagaatttgttattagctgcataccagatatcagggaaacaaaaaataataagaatttgtcattaacggaaaaatgactgtgatctaaccttaaacagtattcacagttgtagatcacagttctcaaaaactgtatatgcatcccattttttaaaaatggaagtttccaaaaccttttgcaaggattgtatctaatatgaccattcaattggtttttcagagaagaatagaaggggagaggccacatttattgaacatctaatgtgtacccaaatcatgtggtctgttttctgtatcttttctcatttaatgcgcaaagaccatttccctgttcattaagggaagaatcttaatagtgaaatgtttctaattatgtagaagtggcacagctaaaggctattcaagaggacacatgttacatgacacgttgatactttttaattctagtcctagtacttaggtttcttttcatgacaaaaatgtaccctcttctaaaaagtttaatgctttggaatgtattgatgttctatttgtaatgatggaattaaggcaggctcattgcaaaaatttcattacctaaggaagttatgaagaagaaagaataaccccaaatcccccctgcccagagaaaatcactttacatattttggtgtatgtgtttctaattttcatgtatgaacatttgtgtgtagttttgtcattgcagaagagaattaatagagacacaaagactccaactgttagttcgaaaatggaatctacctcaattgttgctgttaaaccaaaattatggtatggtattgctttggactgagcttctgcactaggctccaacagaccacaccaaaccaaaatgaagtcactcatgctaaatgccacattatcaaactgaaactttaagggagcagataaatctcaaaaaaaacctgtttttcctgaaaacaagagattccagtctaaataattgatgttcaccactcctttcttatttttaatttaaaaaacttttttttaaagacagggtctcactctgtcacccaggttagaatgcagtggagtggttatggctcactgcagcttcaaactcccgggctcaagcgttcctcccgcctcagcctcccaagtagctgggactacagacgtccgtcaccaggcctcagttcttttttctctagttctgttatttgttcccaccttacacaaaacccactgcattgggcaagggctctcattctattttatacaatggaggctgccccgtttgtgaatcccaaataaaagcccatgagatctaaagtcaatttattgtaactttgtcttttgacgtgggtttccatatatctgtgtatcttaggaggatagggaagtaccagggaccacctgaggtgaaaaacaactacgtatttacgccttttagatactaaaaacatcatttaacactcaagacgtcacaaattatgaagtaagatatcctctcagaattaataatttatgctgggctcatgtctgtaaaatcccagcactttgggaggctgaggtgggtagatcgcttgagcccaggagtttgagaccagcctgggcaacatggtgaaaccctgtctctacaaaaaatacaaaaattagctgggcatgggagcgcttgcctatagaacccatataggctgcggggttccgctctccaggagaacgactctcgggtgagagagcagcccacaggcacacaggcagacctgtcctcgaggtcatggagggcatgacttttggggagactcacccgaacaccgtccgggcaggcctgaggctgggatgccacgctgctcctcccggattctgcctgtggtttcatcatcctggtcctaactccgccactcatggcatccggagaccatcccatcaacaccctggagaggtcaagccagagcctcagggtcctcacacccaagcaccggaacggagggctcctgcattgccaagcctcagggactagtttctcaggcaactgtgggactgtactcacttgagcccaggagtctcaggctgcagtgagctgcgacagcaccactgcactcaagcctgggcaacagagtgagcccctgtctcagaaaaaaaagttaaaaatgttcaaaaggtactgagtggtcagaaaaacagaataaatgcctcctatcttgtatctttttgttttgttttttgagatagagtcttgctctgtcgcccattctggagttccatggcatgatctcggctcactgcaacttctgcctcccaggttcaagcgattctcctgcctcagtctctcgagcagcttggattacaggtgtgctccaccacgcccagctaatcattgtatttgtagtggagacggggtttcaccatgttggtcaggctggtctcgaactcctgacctcatgattcgcctgcctcggcctcccaaagtgctgggattacaggcatgagccattgcacccggcccttatcttgtatcttttgacatctcatcattaacatacacctttcttccacaattaaatttagcatcatcatctacaacaaaatgttcctgccccatatactgccactactccactaacataaatgcaaagttcttccaagtgtcataagttcctgtgaccattttcaaagccacgatttatggggaatatcagttattgctctttgtataaataaacaaaggccaaccaaataagaacaaagaggctgggcatagtggctcatgcctgtaatcccagcactttgggaggccgaggcgggtggatcacctgaggtcaggagttcaagatcagcctggccaacatagtgaaaccctatctgtactaaaaatacaaaaattagccgtgcatgaaggtgcacgcctataatcccaactacttggaaagctagggcagaaggagaatcatttgaacctgggagatggaggttgcagtgagcctagatcgtgccactgtgctgtagcctgggccacagattgagactccgtctcaaaaaaaaaaaaaaaagaataaagacaggcttatgcatatagaacttgctacgtagtaagagttctgtttacatttaagttccatttgtttatgttctctgtagattgtggatattaggcctttgttggatacatagttcgtgagtatcttctcccattctgtaggttgtctgtttgctctgttggtagtttgtcttgttgtgttaaagcttttagtttaattaggtatcacttgtctatttttgtctttgctgcttttttggaaactcagccaaaaattccttgccaaggcccgtgttgagaagagtatttcctaggttgtcttccaggatttttatagtttgatgtcttgtatttaaatctttaatccattttgagttaatttttgtatatggtgaaaggtaaggggcccagcttgaatcttctgcatatggctagccagttatcccagcaccatttattgaatagggagtcctttccccattgctcatttttgttgactttgtcgaagatcagatggttgtaggtgtgtggctttatttctgggttctctaacctgttcctttggtctatgtgtctgtttttgtaccagtaccatgctgttttggttactgtagtcttgtagtatagtttgaagctgcatatgtgatgcctatcagcagtggactgaataaagaaaatgtggtacatatacaccacggaatactacacaggcgtaaaaaaaataaatcatgtcctttgcagcaacatgaatgcagctggaggccattatcctaaacgaattaatgcagcatcaggaaaccaaataccctatgttctcacttataagtgggagctaaacattgagtacacatggacacagagatgggaacaacagacactgaggcctgcttgagtgggaagggtggcatgaggctatggatcaaaaaactattgggtactgtggtcactacctgggtgatgatatcatttgtacaccaaaccccagtgatatgcaatttacccatataacaagcctgcacatgtatccgttaaacctaaaaatagaaaaaattaaaaataaataaataaatgaggtataagtctaattgctgaacgttgtgaaatgtaaccaacagagccattgaaaatagagtggccaggcatggtggttaatgaatgtaatcccagcactttgggaggccgaggtgggtggatcacgaggccaggagttcaagaccagcctggccaagatggtgaaaccccatctctactaaaaatacaaaaattagcgggcatggtggcaggcacccgtaatcccagctactcgggaggctgaggcaggagaatcacttgaacccgggaggtggaggttgcagtgagccaagatcgcactctagcctcggtgacagagcaagactccgtcgaaaggaagaaagagagagagagggaaagaaaaagaaaggaaaggaaaggaagaaggaaaggaaggaaagaaagaaaaaaaagagtgagagtaccgtatttggaaagtggtccaggcactggggtgagtgtcagccaagtcatcacctgtgagaacaggaagtcatcaggtaatatatcaagttgatatattgagaaggagcaggatctacctattatataacacagagataatcactcagatatatagattagaaatagtttagaaaatttaaacatttgattattcagggagtagacctgggagcattggagaaataaggtgggggagtagactgcatggaaagctctttcttagtgtatgatttttcaatgatgcacataggtttcttacataacatgtaaaattcaattaaagaagaaacaaagttgtgttctggggtcccaaaggttcagtgattaattagaagaactcacaaaactgagtcaagctgttatactcatggttatagtttattacaacaaaaaggtacagattaaaatcagcagcagaaaaaggtgcatagggcagagttgaggagagaccaagcgcaagcttccagttgtcctctcccagcggcatcatgtggacagtgcttaattcacccagcgatatgtggcagaaagtacagaaaatactccccaacaaaaagcttacctgagccttggtgttgagggttttactggaggttggtcacatggacaagagcacccatttggatgaccttagtttctctgtctccacccttcccaaggtcaagctgacactgcatggtccaaggtccccacaataaatcacattgttaacatggactatataggcaggatattccaaggagttagaggttattttccaggagctgggctagagtcaaacctttctttggagtgtgcggggtttggacaattcaggcctactaagtttccttgactgcacacaagtgatagtgagtatgtaggaaatgagtagtctcatatattgctggtgaaagtatagtgttatataaacctccggaaagaaatcgagtgtgtagtgcgtagacattttatttggtttgtttttgtttttgtctgagacaggtctcactctgtcacttgagctggagtgcactggcgtgatcacaactcactgcagccttgaccacccaggctccagctatccccccacctcagtatcctgagtagctgggtccacaggcacgtgccaccacacccagctaatttttgtgttttttgtacagagggggtttcatcgtgttgcccaggctggtctcaaactcccgggttcaaggaatcccccacctcagctccccaaagtgctaggaatacaggagtgagccactgcgcccaacctgttattttttttgtataaattaaattgtatatgttaggctcggcacggtggctcacgcctgtaattctagcacttttggaggccaaggtgggtgaatcacttgaggtcaggagttcgcgaccagcctggccaacatggtgaaaacccatctccactaaaaagacaaagttagctggacacggtggcagatgcctgtaatcccagctactcgggaggctgaggcaggagaatcgcatgaacccgagaggcgggggttgcagtgagctgagatagcgccactgcacttcagcctgggagacagagcgaaactccatctcaaaaaacaaaaaattgtatatgttattgtatgtatgtgtatatattaaattgtatatacatatatattacattatatacgcatacgtttgtttcctcgtgcaatctgtttcagcagaagtaaaatctcataaagatagaagtaaaagaatatttacagaagcattatttttggttgcaaaagtactttaatatcttaaatgcttatataatggaagataactcttaacaaagaattagttaactttttatctactataaaggtatcttaatatctttatacctgaagtgatatttgtggcaaattgttatatttcaaaaggagaatgctttataattaaagaaaaaagaaagaaacgttatatagtaggcctcccttatctgcaggagacgtgctctaagaccctgtacccagaggctgcagctccagccgccctgtcaagccagcctgccaagctgctcctgctccaaaccagccatgtctccaccaatgctgtgtggcccaaagtttttttatgagaaatctactgatcatcttattgagcatcccttgaatgtgatgagttggtttcttctctcttgctgctttcaggaatctctctgccttggctttcaacagtttgatgtgtcttggaatggatgtctttgagttcatcttaattggagttcattaagcatcttggatgtttacattcatatctttcatcaaatttgggaagttttaggcattaattttaggcattaatttttgaaataatctctctggtcctttctcttttcctactgaaatttctacagagcatatgctggtctgcttgatggtttttgtactttgaatgagcctttcttatttatttgtgtgccttgtgattgttgttgttgttgaaagctagatatttgactccaataatatagtaactctggaaatcaggttcttccttttttggtgtttgtgaatttttttgttttttgatcattgtaggctccctgtgtcatggattacccggagatgtaagcttaaagtcttctcagatcttcttgaagcctgcatccttttctgggcatgcaccgtgactctctaaattccccggtgtgtctggtttttaataaaatctcctaggtcagtagtccccaatctttttggcaccagggactggtttttggaagatagtttttccatgggcccggggagggggtggggtgatatcaggatgagtcaagtgtgtcaaatttattgtgtactttatttctattattattacatagtaatatataatgaaataattattaaactcaccataatgtagaatcagtgggcaccctgagcttgttttcccataactagatggtcccatctgggggtgatgggaaacagtgacagatcatcaggcattagattctcataaggagtgcataacctagaccccccacatgcacagttcacagtagggttcatgctcctatgagaatctaatgccaccgctgatcagacaggaagcagagctcaggcggtcatgtgaacaatggagagcagctggaaatacagatgaagcttcacttgctcgcccgctgctcacctcctgctgtgtggtccagttcctaacaggccacagaccagtactatgggttggggaccccatcctagagtttgaatgtctggcccccagaagggaaaaaagagaaaaacaaagaggaaagaagggaattggatctttaaatcacctggaagtagcttcagctggagcaagaggggcttggaatactggagcagaagggtgcagcaatggcagactgctaatctgtctgcactgccaagatcagaaatagcaatgagaaatcagatacccaagttttggaggacaggttccttgctgcccaccctggctcccttaagctgccagatatgcatggctgcttgccccatggctgggggatgagttgctgcctggagctgaaattagcagaaattaaccacagtttgccatccatgcctttccctggaagttacaagctttgaatatattcaggttccaaaatggtcacataaggtagattctgccagtacaattgttgtctaggtgggatgacacattcctagtgcttcctgctctaccatcttttagaaccctctgtccatataactgtattttagagttctttatatcatatctaatagatgagattatcaattttctcttaattctaccatacaacatttactttttctggtcaaggaaacaaagtgtttttcttatttcttttagatttggattcgaggtatgaaataatcaactacgggaacatgtacatttatagaaaacattcatttcttactctccatcagataattcaatatggagagaaaccctatgaatgtaagcaatgtggaaggcctttggtcgtcatacagaccttagagtacatcaagtaattcacactggtgagaaaccctgtgattgccaggaatgtgggaaggcctgtgattgccaggaatgtgggaagtcatcatacagaccttagaatccacaaaagaattcacactggtgagaaaccctatcaatgtgaagactgtgggacaacctttagtcgtcttacagaccttagagtacatcagagaattcatactggtgagaaaccctatgaatgtgaagaatgtgggaaggccttcagtcgtgccacaaaccttgctcaacatggaagagttcatactggtgagaaatcctatgtgtgtcatgaatgtgggaaggcctttagtgaagttggaagacttaggaaacatcagagaattcatactggtgagaaaccctatgaatgtaaggaatgtgggaaggccttcagtcaagcctcaaacctggcacaacatgacagaattcatactggtgaaaaaccctacaaatgtaaagaatgtgggaacgcctttagtcacacgtcacatcttgttagacgtgaaagaattcatactggtgagaaaccccgtgaatgtaaagagtgtgggaaagcttttaggagtaaccatcaacttactatacatcatagatttcatactggggagaaaccctatgaatgtaaggagtgtgggaaggcttttagtgtgtatggacgactgagtcagcatgagagtattcacagtggtgagagaccctttcaatgtaacaaatgtggaaagtcctttaggctcagttcaagtctcaaagtacatcagagcatgcatactggtgagaaaccctttgaatgtgacaaatgtgggaagtcctttaggtttagttcaatccttcaagtatatcacagaattcataccagtgaaatactttatggcatatacatataatagacaatgcacagtatatgaatgaattataccactgagaaacagttgaatgaagaaaatgtgagaaggcttttatgcatggatcagtttttacaggacgtaaaataatctatactggtatgaactcttttggaatataaatatttgaagtttttaatttatgactcaagtgttcagagtatttatgttgtattttataaaagaaagtattttatggcattcctctatgtttcactgttcaatctgtggccagactgtgcagccaaggttaaaaggcaggtaagtgccacccagggaagagactggtacatggtttgaggttgtggaagacagactacaagcacaccaggctcaagtggttcagcatttacttaaagctagagaggagaaagagtgcataagatcgtgccgcttgcaatgtgtcagtccccctagccagcagttccactgtgcagctgatatggaagacactagcaactgcacacaccccactttgtgctgcagtgacaggacttcatcccttccccgcctcgggtctgaaatacataatgctgggaatgtgcttcaaggccactgacagatgtgcttaagcagaacaaaagagtatacaataagtccaaaacagggaaatacagtcccacacaagtcaataatcccagcacaggctatgagggcttttgaatctcatggtagggaagtgttccaggcccaaggctcagtcttatgtggccatgtgagggctgaaagactgcatgacggcctttcccaacactatttatggattctcagaatatttatactaaaggaatattaagagaacacacaaaaccttgtttatttgttttatgtataaaagctttccagcacaaatcattattaaacttgagtaaattcatatcacagaaaacctctgctaatgtaacagacagacgtaggaaagcgtttagcctttgtatgatcttaaccattctaattgtctttccactccttgttttttctcattcgtatatggcaatactaataatatctacattatagtggctgttagaactaaatcagttcatttatgtggaaaacatgggaaagtttttgacataatagttcatgttcgataaacattagcgactgtttctaataccatttatgttttgagatgaaactcttatgggtctaagaatttaggaacatttcatgtaactgcttaccccttttttaatgtgaattttttctttctgaactactctaatagaatgtaaaaaacctgagagcatcttcattctgaggtcttaaggtgaatcaaacacttaatccttgaatgaaatttatatttatacttttagaaagtgtaaaaaaatgttaaattagccaatgatttacattccacttccacatttcaaaattgattagaaattggccaaaggatatctattttgccatttcccccaaatttatgaaaaattagaaacataaagaaaagctgaaaaacagtacagcaaatatatgttaatattatgtcatatgacctttctgttttgtatattttgctgcatcattggacagttgtaaacatcatgatgtttcagttttaaatatatcaaaatgaatcccccaaagagacagatttctttttttttgctttttttttttaggcggagttttgctcttgttgcccaggctggagtgcaatggcacgatctcggctcacggcaacctctgcctcccgggttcaagcgattctcctgcctcagcctcctgagtagctgagattacaggcatgagccaccatgcctggctaaatttgtatttttagtagagacggggttttgccatgttggtcaggctcgtcttgaactcccaactttaggtgatccacctgcctcagcctcccaaagtgctgggattacaggtatgagccaccgtgcccggccaagagacagatttctaattacataagaaaaataataattttggccgggtgcggtggctcaagcctgtaatcccagcactttgggatgccaaggcaggcagatcacgaggtcaggagatagagaccatcctggctaacacggtgaaaccccgtctctactaaaaatacaaaaaattagctgggtgtggcggcgggcgcctgtagtcccagctacttgggaggctgaggcaggagaatggcgtgaacccgggaggcggagctcgcagcaagccgagatcgcgccactgcactccagcctgggcaacagagcgagactctgtctcaaaaataataataataataatttcatattctaatgcctaacctgtattcaaattttgaaaatttatccaagttatatctttttggtcattttcaaactggtatttgctctagtttatgcctttatgataaagcgttactcacttttaatttagaatagtggctggaaaactatggcctacaggctaattgcaacctgccagtggattttgtagttttattgcaacactaccacattcacttgtttacatgttttcttcttactaccacgtcagagatgtcattgcaatgagaccatttgcaatggtcacaaaacctactgtatataatatcatgacctttctagagaacatttgccaactcatttagaacaatatctctactgttttttttttttcatgagtttggctttttgaagaccacaggaaagttgtctaatagaatgctgaacattctgggttgttttgtgtgtgtgtggttttgttttttcgtttgagacagggtctcgctctgtcacccaggatggagcgccatggtgcaatcacagctaactgcagccttgacctcctggacttaagcaatcctcccacctcagcctcccaaataactgggaccacaggtgtgtgccaccatacctggttaactttatttttttgtggagacagggtctctctatgttgcccatgctggtctggaactactgggctcaggggatcttcccacctcagcctcccaaagtggattacaggcatgagccatcacacccaactgtggattttaaaaattgtttcattgtgaagtcttatttttctttatcttagtcctcatagttctagtatatttgaagttaaaccaagaggtttactaggttatgattaagaattttcagcaagaatatgtcacagatgatgtgcacactaaaaagcgtataatgtttgattttttccaggactaaggatgctaagtgtcatcacttggttatagtggtgattgcttgatctctccagaatagagccccattataaagagccattttacagttattaatctcagggatattgtgtcacatccttttagaaatctataatccttttagaaatctaaaagcaacatccttttagaaatctttagaaatctataatttagaaatctataattaattaaatccttaattaaatatggaattaaaaatggaaatcagggcctcttcagaaagtaataataattaaaggcctgtatattagaacatggggatattgccagacctttttgggaatttaatacccttcaatgcacacaggaaacgaagagtaaaggccagaatttgtgttcaccactctatccccagaacccattcaatacctgttaatgagctggcgttgataaacttgataaaccctaagccaatacaaagcaacagttaatacaacagaagaattagagcctagtgattagtaaacaaaatagtaccgtttcaaacagttttgttcccaccagtgaaaagcaatgaatgcgtctacaagtacatttttattgattgagaagtgaaccattatcttgaacaaaggtgtgccactggtctccaggaccactcaggctcaatgatttgctggaaggactcctgggatccagaagagctgccatactcaaactcaaggcgaaggatgcaggcaacaatgaacaatgggagaaggcactggacaaagtccaggagagacgaggcacaagcttccagttttccccttccattagaattgcatggcaacagcacttaattcttcccaccatggtgtgtgccagcatgtgcaaagtagtgccaaacaggtaatctcgtctgaatgctggtgtccatggtgcctgggtgactgaacttaactcctgaatttactcagtctccagccttccagaagtcaagctcatatagcatgggccttgggcacacaaaatagccattcatcataagtcacattttttgcataaactttgtggtgacagtgatacagcataggaagcacgatagtccaagtactcagagattatctcccaggggccagtgaagggccagtcctcctgaacacaggcttttcattggaatgtataagggttgaacaccacaggcctgctgaggtaaccctttcctgcacagtcaggcagttttgggcattcttatttcagagaacctgattactaaagtacccatgtaataaatgatagatagggaaaaatcttaaggatataaaaaatatttcagaaatattatttttgaaaaaaatcaggttacaagccacatgtagaacatgatattatttgtaaaacatacacatatttcaatataggattcaggccattatatataactagactgaaaaagtctagaatatcatacacccgtatattaacagcgtttatctttttgttttgatcttggggtattttggttaaatatatcataatttttggtcagttgccatgccttacttgaaatatatgtatgtaaacttttgtgtgtgtgttttaagcggaaacctacactctcaaaagcagaacgttcactttttaaaaccatctcggctgggcgcggtggctcacgcctgtaatcccagcactttgggaggccgaggcgggcggatcacgaggtcaggagatcgagaccatcctggctaacacggtgaaaccccatctccactaaaaatacaaaaaattagccgggtgaggtggcaggcgcctgtagtcccagctactcgggaggctgaggcaggaaaatggcgtgaaccctggggagcggagcttgcagtgagccgagatcgcatcactgcactccagcctgggcaacagagcaagactccatctcaaaaaaaaaaaataaaaataaaaataaaaaataaaaaataaaaaataaaaccatctctacttgatcttacagaaaaacaataaatttggattgtttttgctgaattacttgtgtttccttcagtttcctcatagctgaacctcctctaagatttctgtcacatcacctgaatctggatagtggtccttaatacattgattcctagtcagagtttattttactagaataaaagacaccttagcaactatgtcattttagtctaccacctcaaatgctatgattgcaaggtctgttacactataagcacttatacctgtaggcaaattatacttctaggaattcgcttaaggaaatgcaattacgcctcacttagcaacagggatacactctgagaaatgtgtggttaggcaattttgtcactgtgcagacatcacagaatgtacttaaacctttggtatagccgattacacacacatccaggctacatggtatagcctattgctcctaggctacaaacctatacggcatgttactgtagtgaataccgtagccaactgtaacacaatggtatttgtgtgtctaaacatatctaaacagagaaaaggatcagtagaaatatagtatatagccaagtgtgctggtgcacacctgcaatcccagccactctggaggattgcttgagccaggagttcaagttcaggctgggcaacataatgagatcccatctcaaaaaacaaaacagaaaaacacagcctgggtgtggtggctcatgcctgtaatcccagcactttgggaagctgaggcaggggggttgcttgaatgcgggagttcaggaccagcctaggtgacatggcaaaaccccatttctacaaaaaacagaaaaattaaccgggcctggtggcaggcgcccatggtcccagctactcaggaggctgaggtgggagggtcacttgagcccgggaggcagaggctgcagtgggccgagattgtgcccctgcactccagcctgggcaacagagcgagactctgtctcaagagaaaaaaaaaaaaaaagatagtataaaagataaaaaatggtacacctatgtagggcacttatcatgaatgaagcttacaggactggaagttgctctaagtgagccattcagtggtgagtgaacgtgaagacctaaaatatttctatacactactgcagacttcatgtaaacactgtacacttgggctacactaaatttatacaataatgtttttctccaataagaatcttagcctactataacttgcaacttaatttttactttttgacttttgtaataagacagattaaaacacacattatacagctgtataaaaatattttcttttaagtccttattcatatacctttttctatttttaaatctttttttgctttttgaacttttttggtaaaagctgagacacaaacacacaccttatcctaggactgtgtcaggatcatcaatatcactgacttccagctccacatcgcgtcccatggaaggtcttcagtggcaataacacacacagagctgtcatcgtctataacaatgcctctggaatccctcctgaaggacatgcctgaggctattttacacttaactttttcttgtaaattgcaggactacactctaaaataatgataaagagtatagtaaacacataagccagtaacatagttatttattatcaaagtattatatatgtacagtacatattatcaaagtaactatatacttttatacaactggcagcacagtatgttttacaccagcatcaccacaaatgtgatgaatgcattgtgctacgatgttataacagctaccacatcactaggcaacaggaatttttcaggtccattataatcttatgggaccactgccatatatgtgatctgttgttcattgaaacattatagcctatgactgcactagtaaaaatacataaaatgcatgtacaatgatgttcaaaatgtatttttgataaccaaacatttaaaacaaaaatctaacagcaacacattaattacttcggctctgctatatgacaacaaatacaattttttttgttttgttttttgttttttttagatggagtctcactctgtagcccaagctggagtgcagtggcatgatttcggctcactgcaacctgtgcctctggggctcaagtgattctcctgccttagcctcccaagtagctgggactacaggtgcgtgccaccatacccggttaatttttttgtatttttagtagagacgaggttttaccatgttgccctgggtggtcttgaactcctgagctccagtgatccatctgccttggcctcccaaagtgctgggattacaggcgtgagccactgtgtctgtctcaacattgttaatcatattgattttaacctagactaacaaagaaacatatgcaagaagaatcaccgaggaaggcaggtttaaaataataaatttccagctgggcagggtgactgacatctgtaatcctgccactttgtgaggccaaggtgggaggactgcttgagctcaggggttcaataccagccgaggcaatgtagtgagaccctgtctctacaaaaaatgaaaaaattagccagatgtggtggtgcatgcttatgatcccagctactcaggaggctgaggtgggaggactgattgagcccaggagacagagactgcagtgagccgtgactgtgccactgaactccatccagcctgagtgatcaagcaagaccttgtctcagaaaaataaaaatagaaatgatgacaaaatatatttccataatttgaaaattttatgctgttcaaattcagaataatcgggttgtcacagagctcatagagttcatgacatctgttctgtcctaagcagggctggagtcaccccaaaagtggcagcagggaagttctcagaaggaattccatcccaagatggagccagctgggatcctaaagacagaagcactgaaagtccgggcaatcagtgcaaagtgtttactaggggaatttaaatatacagggccgcggcctgagagggataacgagaagagagatgtgccacccatgtaatgtccttaatgaagggattgggtcatggagtttacatgacagttaaaatatttggcccaggatctagtatacgtgtttagcaacatggttaatctttcagtgcatcaagcaacaacctaaaactaaatcagttcttaggaatgtgcaaggccctggtttgggtttaggctcaagctgaaaacatgcagctggtcaggtcatagtggtcaaagcattctgtttcttggtcagaacaaagaaagtgggggcagccagagtctcctacttttttttttttttgagacggagtcttgctctatcacccaggctggagtgcagtggcgccatctcggctcactgcaacctctgcctcccaagttcaagtgattctcctgcctcagcctcccaagtagctgggactacaggcgcctcccaccacgcccagctaacttttttgtatttttagtagagacggggtttcactgtgttagccaggatggtctccatctcctgacctcgtgatccacccacctcggccacccaaagtgctgggaatacaggcgtgagccaccacgcccgtggtgccacctggcactttttctgttgttgtttttttgagacggagtttcactcttgttgcccattcccaggctggagtgcaatggcgcaatctcggctcaccgcaacctccgcctcccgggttcaagttattctcctgcctcagccttctgagtagctgggactacaggcacctaccaccacgtccagctaatttttgtatttttagtagagacagggttttgccatgttggccaggctggtcttgaactcctgacctcaagtgatccacctgcctcagcctcccaaagtgctgggattataggtgtgagccaccacacccagccaaaatattcacattggtttttactgtacaaaggtattatggatgatgtctctcctttatgtttatttccaatttttctcagatattattaatttttataaggaaattactaaagaacaaggatttcttgtcaggtcctgtttttctcttatattgtaagacctaaaatttcatctgttatcttaacacctttgagcctcaccgggtcccaaaggcctaaccatgagtttccctgctctcatcagatatgccccctacccagcaagaaaggctcccagccagttagttccttcgaaggccagaccagctatatcccacctggtcctcaagctaatggagttcatctccctgccagcccatgaaaccaatgaagcaagataatctcattctcccatggaaaccagggggcgcctcatcctcttactattataaaacctgcctctcacagcccctgctgaggtagtctacttccaagtgcaatcttcctgcagaggtgctaactttctttctttgggatatgcatttttatgtgattaataagctgctgtcaatctcatctgtccagtttccaggtgtcatgtgtcagatacctccagaaccatagggcaagactctgtcaccacaagggaaaagaggtgggcaaaacactttccaattcttttttttttttgagatggagtttcactctgttgcccaggctggagtgccaccctgttacccaggctggagtgcagtggcacgatcttggctcactgcaacctctgcctcctgggttcaagtgattctcccgactcagcctcccaagtatctaggattacaggtgcttgccaccacgcccggctaatttttgtatttttagtagttggggtttcaccatgttggccaggctggtctcaaactcctgacctcaattgacccacccacctcggcctcccaaaatgctgggattacaggcatgagccaccacgcctggctccaactcatttttacttccatttcagagctttcagtatccatcgtgcatggttttataaaactcaaacttcaaataaggcactaaatcatgttctcagtctagtttaatgcatggtctgaagttgagctactcaaaataattttggaaaagtgtctgtggctgaaatttcattttgctaagcatacaaacctaaaatgaatattattttagtgttgtcctatttgtaagggagatcaggcaaaaaaattaaaggtgtggaatctctattgagccttgatttacagggaaaaggactgtttgagatgacttttcaggttaagagaaaatggactattagagtaaaaagaattgagtcaaatgaattttgttggttcaggaaacagatactggtgtgaaaatgtaaaatggtacaatcatgatgagaaatttgtcaatgtcacaagttaaaatgcacatagcaaacctacttttgagaattgatataaaaacgtacaaatatgtaaactaatgtttacacaagtatattgtttggagcattgcttttaagaaaacataggggctaggtgcagtggctcctgcctataatcccagcactttgagaggccaagatgagcagatcacttgaggtcaggagtttgagaccagcctggccaacatggtgaaaccccgtctccactaaaaaatacaaaaaaattagcgaagtgtggtggtgcatgcctgtaatcccagctactagaggggctgagtcaggagaatagcttgaacccaggaggcagaggttgcagtgagctgggattgcaacagtgccagcctaagagacagagcaagactatgtttcaaaaagaaagaaagaaagaaagaaaacataggaaattccttaatatacagtaggagaaggcatgtttcttaaactaggatgcagccatactggggcctttggcattgttgaaaatgacattccttacgtactgatttggaactatgtttacatgaagaaaacgaaatatgtacttatatatgtgttgtggaaagtctgggaccctgaacggagggaccagctgaagccacagcagaagaacataaattgtgaagatttcatggacatttatcagttcccaaaattaatacttttataatttcttacgcctgtctttactgcaatctctgaacataaattgtgaagatttcatggacatttattagttccccaaattaatacttttataatttcttatgccatcttactttaatctcttaatcccgtcatctttgtaagctgaggatgtatgacacctcaggaccctgtgacgattgtgttaactgtacaaattgtaaaacgtgtgtttcaacaatatgaaatctgattgtaaaacatgagtgtttgaacaatatgaaatcagtgcaccctgaaaaagaacagaataacagtgattttcagggaacaagggagataaccataaggtctgactgcctgcagggtcaggcagaataaagccatatttttcttcttgcagggagcctataaatggacgtttgagtaggagaaatatcgctgaattcttttcccagcagggaatattaataactgataccctggggaaggaatgcattcctgggggtaggtctatagacggccactctgggaatgtctgtcttatgtggttgagataaggactgaaatatgccctggtctcctacagtaccctaaggcttactaggattgggaaattccagcctagtaaattctagtcagactggttgtctgctctcgaatcctgtttcctgttaagatgtttatcaagacaatgcgtgcatagtgggacacagaccctcatcagtaattctaattttgtccttgccttgtgatcttttattgccctttgaagcatgtgatctttgtgacttactccctgttcgtacatctgctccccttccagaatccctaatagaaacttgctggttttgcggctcaggggcatcacggaacctgccgatatgtgatgtcacccctagaggcctagctgtaaaatttctctctttgtactctttctctttatttctcacaccggctaacacttagggaaaatggaaaagaacctacgttgaaatattgggggctggttcccccgaaataaacgcatgttacatatatgtatatttggaattatatatggatataaatacatttgtatgtgtgtgtatatgtgcatatttttatataaaaataccttctctggaaggatatataccaaaataaaaatgttgactctaaggttagctactgtatgactggactatgtggaaggaaaggctgcttatctttttacttaaaccttttcatacctattgaactgttattctatgtatgtattacatatttaaaatacgtaataatgctgatgactaaaacataggcatcctttgatgagtatgtttcccatttgctcaatgtcctcatgaacataaatacatataaacacaaccttggttcctttttttttttttaagacaaggtctccctctgtcaccaaggttagagtggcactgcagcctcgacttcccaggctcaagccgtcctcccacctcagcctcctgagtagctgggaccacaggttcgaacctttttattttttgcagagtcagggtcttgctatgttgcccatgctggtggcgaactcccaggctcaagcaatcctcccacctccgcctcccaaagtgctggcattacaggcatgagccaccacgcctggctcaattcttctgacagcaccttctacccagattttgggcgtttggccacaatttatcttcactgtcttgggatctcatgaccaggcattaccaatgaaagatgtttctccagtctatgggctttaaaatgcagcaaagcccatccatgcaaaatacaaaaagtattacacaagcgtacagaattgtacattataaacctaccttcaggagtttataccaactcaagcgcgcgttgttactcggggtcacagcactgattctacagggcagtcatcacacacgtctgaggcctcagaagagcgtcgaagtcacctttcagcctaccccagccaggttccactcagactcgcctcctggggccctaagaacacaggaacaccgcccttgacctagcgtcagaaacgttccctcacgggttggccgctctgcgcatgcgcactcctagcccaggctgcaactccccgaagcctccgggactcggcggtgggcgtggcgggcggtcgccgtggtcaccacggcttttctcagaggttttaacgcccctagacttcatttcccgacagggactgcgggtctggatattccgtcgtggactacgtttcccactgacgacggagaaaacttggtcctttggctccgcgctgcgcgtgacctgcagtcacctgagcaagagggcggcgtgggtcgctgcgggagcccctacagccccagcccgcagcccacgtggcaccctacagggctgtgagagtggggctgctggaggcgttcagagcgcggaggccccaggcgcgggccgggctctctcccgcctcctcaggcccgggggtgctggagctgccgaggtgggggctcatctttgggagacaggtggggagtgtgagagaccgcgcagcggcgacagggccgggcgtgcctgtgtgacgtgggtgcagctgtgggactgtgaggggtgcgtggtcgaccttgcgtaacctggatgtgcagtgcgtgtcctttgcaaagcgtgcgttgctgtggctccgtggcgtcagcaacccttccctgctgtttcctttgtcctcctctcagtcaagtatgactgccacagagaaatggtcccatccaggaaatcagatattgagtcctacctgagtttccagcaagaaggtacggacttgctgttaggatgggaattatggatcaggaattgccctgagatggggtcctggtaacagatagactctaggataggattccctcctggggattgcggcagagtgtacttgcaagtggagccttgaagggtaagatcataaatgttctacattgtggtgactctggaatttgtagtatttgggacaatacagttactaaaaagacattattgcgtcctttaaaatgtttattatctgtcagtgaaggtaatatctgaataggattaatatgtgttaggcagtgtgtgatcctacctcgtgaattcgctggaaatacacttcagtctgtctatcacaacaggatatgaacaaattataccaatcctgttgaatctatggcaataaatagattttgtgctgtaactttcgtggctcacagtttccttctaattaggttagatgcaaaatgaaagtattataatagaataaagtaattcggccgggcgtggtggctcacacctgtaatcccaggactttgggaggtggaggcgggcggatcacgaggtcaagagatcgagcccatcctggccaacatggtgaaaccccatctctactaaagatacaaaaattagctgggcgtggtggcgtgcgcccagtccgagtagctgggactactcgggaggctgaggcaggagaatcgcttgaacccaggaggtggagtttgcagtgagccgaggtcccgctactgcactccagcctggcgacagatcgagactccatctcaaaaataaaaataaaacaaaataataataattcagaagctgtctgaggggacatgacttatctgacaggcttagaaacaaaataagcctttttgtccagaagatctgaaataaagctgtgtggtgaccgccatcagtttattcaaaagattactcagggactactccccattttttcaagacagaattctgtcatacctgagaagaaatgatcaagtaagttcagataataggatccaaaggaaacaaaagataagacatttagtataacaacgtaaatgtagagaacaaagacattgtctcaagtccctttcttttgggggaacatcttcctgttaacaacaacaacaacaacaaaaactaaaaaagcccacatgtgtttcaagttaacctattgttattattggaataattatgaacaaggctttaaaaattaaaatcaaggtcaaacaaaaagaaaaatagtgttaataggtggccatataaccttccaagtttttgtttactgatttcagtaatcgtctgcttctctgtattgatagtcatgttttataataatgattatattggccaacctgatttttctattgacagtatatctgaaatatttcctgtgtccttaagtatttttcacagcttcccattttacatgtacgatggtctgccatatctagtaagctttgtcagatccaaaatactaaatgctgcctttctgtccccagtgtctttgctcagttcaaaagccacagaagaagttctggacgatgtgggccttcaatcttctaagatgggaatagaaagaagaggatctacccagaccaggaccctgctgcccaatctcaggtctacatctgcctcaccaaaataatacagtggccagaaacctccctgctaacatcatagtttgtctgtgatgcagaaatgcctctgttttgttgttgttttgtttttgtagagacagggtcttgctctgtcacctaggttggagtgcactggcacaatcatagttcactgcagccttgaactcctggactcaagcgatcctaccgcctcagcctcccaagtagctgggattataggcatgcgccatcatgcctagctgatttttattttgtagagactgggtctcactatgttgcccaggctggccttgaactcttgacctcaagcgatcttcctgcctcagcctccccagttgctgggattacaggcgtgagccatcgtgcctggccccagaaatgcttcgcttctatgactttgttcagtggagacctctgtgatttgggggaggaaatagatttatccagaaccccaatttgcccgaattatgtatgatgggaaatagtttgagacctggaatggaagagcatcacagcaatattaagtaacttaaggtctgtcaggaacactaatgcaaaactggtctcaaggtctttcttcttcctccagctctggctttctggatctgtgcttctctggtagaggaaccctgaggactgatctactcttgcagttctaaaaccatggcccatgtaagttcacgtttttctccttgttgaaatatgtgtgtgttggccaggcacggtggctcaggcctgtcatcccaacactttgggaggccaaggcgggtggatcacctgaggtcaggagtttgacaccagcctggccaacatggtgaaaccctgtctctactaaaaatacaaaaacagcccagcatgatggcagatgcctgtaatcccagctactcaggaggctgaggcaggagaatcgtttgaacctgggaggcagaggttgtagtgagccaagattgtgccactacactccagcctggacaagagcgaaacttggtctcaaaaaaaaaaaaaagaaatatgtgtgtgtttttaggtcatgaaggtatttttattaattttcctgaaatttcctaccaggagaggctcatcaaataacatgcttccagctcttattcttccagttcccagcatccacccaatatgtcccattataaacctcctttgttcatgtaattactgagcaaattattcagcatgtcttaagagccctctatcaagggcagtggtggagttaagtccttttaagtaaagatttgtgctttttgggtcaagtctagtttggtaagatagagtcaatggttgtatttgaccatccataacaaaacttaaattatcaccgactggagatttccaggaagtgaagatgaaaatttggtattgaatgatcaaactcagtcattcattgggtgaaatctcatgctttgtgtggttcagtaaatgactggggacttgcaaacttggaggttatggattttggcaagaaacccctcaggaataaatatcaggactattctgatgttggatggaacctactaaatttagatgacatgtatataattcattattcttccttagtattctttaactcaatgcatttgttatctattattacataacaaattagaccaaaacttaatggcttaagacagcaaacatttatctcacagtttctttggatcagaaatccagacatggcttagcttgcctctctggctctcgatctcttacaaggagatccaggttttggtcaggactacagtcatcttaaggcttaacttggggtggatctttttctaagctcactcaactagttgttaacaggatccagtttctcacaggcttcagactgacagtcttagttcctcattcgctgttgcctggaagctgctcttggtttattgtcatgtgggtctgtccatagaatagcttaaaacatggtggctgtgttttaatcagtgagcaaatgagacatcaagagagggagagaaatacagaaaaagtgctgaagtaacatttcagcactgtagctattctgcttattaagagcaagtcacttggttcagcccacgtgcaagggaaggagattacacaagcatgtaatactatcggatggggatctttggtaacctatatagcaagccaggtgctcagtgagagatggtagagagccacaaaagagaatgtcattataagtagcaagtgaacacagaatcctagaactggggaagaccttaaaaatgttgtgtatcctaactgcattgtaaacaagtaagtctgatattgccctaagatataattctcatgtgcccccaaaatacatggatttgtcaaaacaagagaaaaatgcttatggtgagatctgatgtaatgaagtatttaatgcttgagagaattcttaattttatgtaaaccctattttctaaaatcaaggccaggtgctgtaatccctgtaattccaggtgttcacacctgtaatctcaccacttaggaaggctgatatgggagcattgcttgagaccaggagttcaagaccagcctggccaacacagcaagaccctgtctctattaaaaataataataatcaagactttatacttcatttggggaaaatatctgattaaattttttgctcctcttaaaagcaaaaattttccccagcaactcatatgtatttaaaaatttatatggcagataccaatcagacattatgcttatattcactgtttactttcataggcaaacattattattttatttattcccaaatggtgcaagtattttagagtatgccacatagttttctatatgccagcagtctttttcaaaaatacgtatacattccacttcagtccccctcatactgtaaatttgtagacaacatgcttgttacattgctctcttcctgcaatacagtccttatttcccctccatccatcttgaaagtattcctttaatttctccagtaacactatgggtttgccatttcgggcatcaatgacattcagggatgtggccatagacttctcgcagcaggagtgggaatgtctcgaccatgttcagaagaccttgtattgggatgtgatgatggagaactgtagtaacttggtatgttttctgcctcagacaatttaggataactttgaatctgctctctaggatgatttttcattgtgatttttagggctgtctttcaagagactagttaaatttcttttcccttttccccaaagaagtggtttgggctttgttgggtaggaagtgacagcttcactagacatactcatcttccctgtccctcagtgatgttcaaacttttctctggtcatagttacagttgtctttcttcttttataaggaagggctagattaggattcagcagcctatattatataaccattgtaaaaggatccaggtttcctatttctttatgctccgaattactgtggatactccattatagcatctgatccacttgcagattaccttgacataggatcctgaattgctctaattatcaaaagaacctttataatgtatatagctttggattagataaattgaattcatttaaaactgaagcaaacacattctatttcctaagcaaattttaacttattcgtggttgaaagttgtggtttaaagttgtcatctataaacattacattttaaatggaatgaatatcctataaatatcttttcttgtatactcttaacaaaacaacaatatcaataataaccttagtagtgaacactgtgtctattaaaggtagtgttctaagcatttcacatatatgtctcaaccaatttaatccttattaaattcgacaatcttattatatcctcattttccagttgagaatattaaagcccagtggatttaaatgacttgctgaaggtcatgcacagctgggaggtggtaaaggcaggaattgataccaggctctagagtctgtattttcaaccatggtattatgtgtactctcaggaaaaaaaaaaaaagatatgggtgtgtaggttatatttaaaatccttacccaacctaactgatttcttgttctttaatttcctcatcctctcaaaaaccttattcagtttcattttgatccttgatttattacaattgtaattttgacagcaaagtatgtttctatatcaagtggcctttttttctttgtaagcaggacatgacttttctaagccagatgtaattacatcattggagcaaggaaaagagccctggatgattgtaagggaagaaaaaggaagatggtgtacaggtaaaaataagtctgactgtgggaagccatctgtgtaaataacaacctgtgtggtcagggaagagacatacacttgggatgttagttggaaatctccattcacagcagagaaaaggtgtgtgatttataaggaagataaatactctgcataagctacccagtgagcttcaccttcaccttaacattcctggatgggaacttgctatccttgaagtgacaaaagaacaaatgccatccctccaagatctggtgtctggtctacctgcacgtccaggagtcccagccaaaccccggctcttcttttcacttttcttgcttttaccttcttcttgctcatcaatttttacgatgtcttccttaggttcttctgtagtcacctctgaaatatccttcaaatcttttttctctttccacagcacatctgcaattctgccttttctcattgactttttccaaagccttttaatgtgttcttttctttccagcttagagatcacatctccataatctttcatgctaccttgatctatggcttccatggcgtctgtggcctccagggcttctgtggcctccatggcctctatagcttgtaaaatgacctcctgctctgtttcagcataatcctgggatttgactgtgcttagagaactcagtggtagctctggctctaaggtaacatgttgggtttcaactagctctgatttcccggcctctctttgttcacctgcatcttctgaaggcatcaacatggaactagacatttccaattttgtctttctgtgcttcctggcaactctcaggtcctttttaactgcagagatattgggagaaaaacagttaacagaaacacagaggtcttgagtaagatcctttgtaaaatctaattcattgagctaccataagagatacaaagcagggggactaaggctttatgatatggaaatgctcggtttcatcccaccatccatattctaacaaaataagagcttggtatttgctgtggggtagatctttctcaggaatgtcactttctgtgaataagattctcccactgaactccattctcactagtatcctttcatataccttggccttacccaccctgccttttggggccctgaggttggccccaaacatgccccatatatcaccctatacatactaagctttctgctccttgcttgaaaatgtctctttcttttctttggtttggtgatctttacaggttctgacaaaggtatgcacatgtcttcagaaaagaccttaagttcttcagaccatggtatatcaaaagaaaaagtaaatgacttttctctttgtaacaaggtcaagttttcatttagctgctgctccacatgaataagcagggactgtatatcttcagcttgaatattcagcagttggcccagagtgatttctccgataatttcttgcctatataagtcaagggaaaagaagtacagtactaagctagtgatagaacaaaattcaaaaaagaaaaagttacaatggaagagagggataaagtagtaatttagaacaggctgaagtaaagtctggttaaagaagaaagaatgtagctggatgcagtggctaacgcctgtaatcccaacgctttgggaggccaaggtgggtggatcacttgaggtcaagagttcaagaccagcctggccaatatggcgaaacctcatctctactaaaaatacaaaaattagctgggcatggtggtgggtgcctgtaatcccagctactcgggaggctgaggcaggagaatcactggaacctgggaggcagaggctgcagtgagccaagataacatcactgcactccagcctgggtgacagaacgagattccgtctcaaaaaagaaaaaagaaagactgagggatggcaaggaatgtagtgccacataactcgttctattgtgcgttgctttattatgcttcacagacactgtgttttttacaaatggaaggtctgtggcaaccctgcctagagcaagcctctcagcatcatttttccaacaacgtgtgcttgcttcttgtctctgtcacattttgctaattttgatagtatttcaaactttttcatcattattattgtatccattttggtgatatgttatcagtgatcttcgaagtgactattgtaattgtttcaaggcaccgtgagctgcacccatgtaagatggtgaacttcaccaataaatgttgtgtgtattctgactgctctattaaccagccattcccccatcttttctcctcaggcctcgctattccctgggacacaacaatattgaacgtaggctagttaatagccctacaatctcctctaagtgttcgagtgaaaggaagagtcacatgtgtctcactttaaaccaaaagctagaaatgattaaacttagtgaggaaagcatgttgaaagtccagacaggctggaagcgaggtctcctgtgccaaacagcaggccaagttgcacatgcaaaggaaatgttctcgaagcaaattaaaagtattactccagtgaacacacaatgacaagaaagcgaaacagttttattgctgatgtggagaaagttttagtggtctggatagaagatcaaaccagccacaacgttctgttaagcctaaacctaatccagagcaaggccctaatgctcttcaattctatggaggctgagagttgaggaagctgtggaagaaaagtttgaagctagcagagaataattcatgaggttgaaagaaagaagctgtctccagaacataaaagtgcaaggtgaagcagcaagtgctgatggagaacctccagcatgtgatccagaagacctagctgaaataactgatgagggtgactgcattaaataacaaattttcattgtagacaaaacagccttctattcaaagaagatgccatctaggactttcatggctagagaggagtcaatggccggcttcaaagcttcaaaggaaatgccatgtctcctgttaggggctaatgcacctagtaactttaagtcaaagctcatgtgtatttaccgtaatgaaagtcctaggatcctaaagaagggtgctaaatctactctgcttgtgctctataagtagaagaacaaagcctagatgacagcacatctctttatagcatagttcactgaagattttaagcccaatattgagacccactgccaagaaagatagatcattttcaaaatattactgctcactgacaatgtgcctcatcacccaagagatgtgatggagatgtataaggagattaatgtggttttcatgcctattaacacaacatccattcttcagccaatgaatcaaggattaattttgactttcaagtcttatttaagaaacacattttgtatggcaatagctgccatagatagcagttcttctcatggatctagggaaagtaaactgaaaaccttgtggaaaagattcagcattctagatgcaattaagaatacctgtgattcatgggaagaagtcaggtatcaacatgaacagaagtttggaagaagttaattccaaccctcacggatgactttcagaggttcaagacttcagtggaggaagtaactgctgcagttacttgtggtggaaataacaagagaaatagaattagaagtggagcttgatgatgtgactgaattgctgcaacctcatgatcaaacttgaatggattaagaatctactcctggtgaagatgctttgaacattgctgaaaggacaaggatattaaaatattacattaatttagttgatacagcagtggcagggtttgagaagattgactctagttttgaaagaagttctatttgagtaaaatgctatcaaacagcaccacatgctacagagacatctttcatgaaagggagagtgaactgatgcagcaaacttctttgtcttattttaataaaatgttatacccacctcaacctttagcacccaccagtcagcagctatcaatatcaaggcaagaccattcaccaacaacaaaaaaaatgacaactcgctgaaggctcagatgatcattagcaattttcagcaataaagtgtttttaattaaggtatctgcattgatttttttttaagatgaaattttgctcttgtcacccaggctggagtgcagtgctgcaatctcagctcactgcagcctccgcctcccgggttcaagtgattcttctgcctcagcctccttagtggctgggattacaggtgcctagcaccacgcccagctaatttttatatttttggtagagacggggtttcaccatgttggccaggctggtcttgaactcctgacctcaggtgatatgcccgcctcggcctcccaaagtgctgggattacaagtgtgagccaccacgcccagcctgtgcattgattttttagatataatgctactgcacacttaatagactacagtcgagggtaaatataacttttatatgcactgggaaactaaaaaatccatgtaacttgctttactgcagtattcactttattgcagtggtctggaaccaaacccacaatatctccaaaatatgcctgtagtcagtgggacacatgatgcttctttggttgggagatttgtggacatgagtcttgaggaatcttgagaaattgaagaaatgatggaaagacaggctagtcagtggtcagaaggaaaggggtaggtgctgggtaaaagagcaaattgaaacaaagaacaaagagggaggaagagaatttatttatttttatttttatttttttgagactgagtctcactctgttgcccaggttagagtgcagtggcaccatctcagcttgccgcaacatccgcctcccgggttcaagcgattcttgggcctcagcctcccaagtagctgggactacaggcatgcaccaccacacccggctaatttttgtatttttaataaagacagggtttcactatgttggccaggctggtctcgaactcctgacctcgggtgacctgcccgccttggcctcccaaagtgctgggattacaggcatgagccactgtgcctggaaggaatagaatttaaaaagcatttttgaaatgggaagaaacagattttggaggataggagatggaaggaaccagaagaggagaaggtcaccatccaacttactgcattttctggagagtttcgtgtttcttcagcaggtgtaccagcctggtcttggtttggatgcctgtgactcttaccataaggtataaggccttagcctgcacattctcatcactgtccatcaatcccatagccagtggaatagcaaaatgatggttcatgaggcctagcctatccagcgcctcccagggtagttcacggatacgtggattggaatggattgtgtcttgtaggaggcgatgggcagtcttagaaaccaactctgaagatatctggcaagtggcaaaaatacgtttaagtaccctaaaatatctcttgtattcctctacagagcagtaaattgtgaggttgaggatggcctctattaaatcatccataagccttccactatattttcttctcatccaattttggtttgccatgctttcaagaatatcaagggaagttccttttcgcaccttggatttatccttttgttgactccttgaaattttctcttctactagagtcatagatgacaagtcccagtccttaacttggtaggatgaatacagatcacagcataggaagactggggtaccctcaggccaagggcgagcacggatcactgagttggggatggccatcaggagcaaagggccattgccgcccttgaccaaagaagcactgtggcatttggtaggcattgaatccatcccagccagccagctgcaacggagcaggaacctcatgtcggggacgattatacttggaatcaagagtagagaaatcaatatccttatcctccaaaagaggaaatttggtcttttgaatcacaagggacatgcttctctcttcttctacaacatgaggcacagtattgtcaaaagcaatgaaccgtttgttgacaagggtctctagcccctgtaattcctgccgcccttttccaaggtagacaaatctgggtacaaatactgtttcaaacataaagaagaagctaggaaggaagggtttagggacttcttgtatttcatctgcattttttaggatacgcaggtgaaccagctgagctggagggagcagctttaagcaagatactatgtagatacgctggttgaaagtcaacaacaggtcacttcgattactggcaaagcagagtggtccaaaatgcagggctgagtcgaactcggttacaagtctaccgtggaagtcccagatccggactgagccatcaatgccacctgtgacaaaaagtttcaggggaaggcagacatcaaatgaagtgatgtcacactcatgcaggcattttgtctctctccacacaaagctctgttttgattctgaagatgtcagaaagccttcatagtgccagagacaccagcagtagctttcagtgatggcacccacagaacctggcaagagtatcacacgttttagggggcagccacagaggattttgctgacaggctgaaggactaccttgttcacctgaagcacggcctctgtcaagtgtatgatgttatccgtgccataggaacagagcaaggcgtttccctgagggccttccagggtagacaatgccaatactgccccagagtgaacagtcttctctattcgggcacaactatagtgggaaagggttctcacaatgccactctcatgcccacagaacatcaatcctcctaggcctttttgcagatgggacctcccataggccaagcatcttactgtatccttacggtctgctgaagtgcacacaagatacttggctgtacaaggagagcgtgttgcatcaaacaccagcacctctgaactgcctattgccacaaagagttcctctctctctgagtcataggcccaagccaaagccttatccataacaagtagaggccaagtgataaccaggagatcccctgttactggagacaagaagcgcaataaaccatcctcagtggcacatagaatccgagtccagttatggccgcagcagacccgctgcacttgctggggagcagaaccacagacattgaagaggctataaaagtagggcaggtgatgcaatgaaaaactgtaggtggtctggcagaaaaaagtggtattatcaataaactgcagtctctgaagatcctcgtcaatattcagctgccgcagcaagttcccataagtgagattccattccctcactatgccttcactgcctgctgttagtaaggtgtggatctctggccggctatggatacatatcactgatgaggaatgggcttgaaagctgtggaggaagttaccttggtctaaaccccaagcgtggatctctccagccctgtttccagcatagaaattgccctgagagacacaagtaaaggagcaagtgatggaagagccactggcgacaggagtgaacttcacttcttccagctggccctgaccccggtgaatgaagaccctcactgtatcctcacacagagccaacagggatccctgggggccattcagggaaaatccctgtacaagctcatgatcagccataggtactatttgagccatctcgatgcccatgccatttggtaagataaaccaggtaaccacagcccccagggtaccagagagcagcaactcagcttctggatcatagaagaggcagctggtggagaaatgacagggcactgtacccagaaatctgaacgttcgacggtgatctccaaaaagcctcaggcgcatgtcaccacagtaagcaattaacatgtggtaggaacctgtgtggaccattgcttgaatgggcggccactgatccatcatgcgaagcctcatcttctctaccattcctttcatttctgtaccctttttttgtatccaaagtactgcctagaagaggatgagagatgaaagcctgactgtggaggtggatcattttccaaagtgtggggtagggaaggctgaatattcagatccctgttccctctggtgtgactaaggaaagactagacagcttgactttaggaatctcctagtacagcagctcccacttacccatggtttccctttctgtggtttcaactacctgtgtggtcaactgcagtccaaaaatatcaaaagaaaaattccagaaataaacaattcataagttttaaatggcatgctgttctgagtagcaggatgaaatctcaggcagtcccattccatcctgcctgggacttgaattatccctctgtccagcctatctacactacataccctatctgcctgttacgtcacttagtagccattgcagttatcagattaactgtcgcagtatcgctgtgcatgtgttcaagaaaccctcattttatttcataatggtcccaaagcacaagaatagtaatactggcaattcagatatgccacagagatgccacaaaatgcttcctttaagtgaaaaggtgaaggttcttgacttaataaggaaagcaattgtatgctgaggttgctaccatctatagtaagaatgaatcttcttggccgggtgcagtggctcacgcctgtaatcccagcactttgggaggccaaggcgggcggatcacgaggtcaggagttcgagaccagcctgaataacatggtgaaaccctgtctctactaaaaatacaaaaattaatcgggcatggtggtgcgtgcctgtaatcccagctactcaggaggctgaggcaggagaatcactggaacctgggaggcggaggttgcagtgagccaagatcgtgccactgcactccagcctgggcagcagagtgagactctgtctcaaaaataaaaaaaaaaaaaagaatgaatcttctgtgaaattgtgaaggaggaaagacaaattcatgctagttttgctgttgcacctcaagtgcacgcattatggacatagtgcatgatagcacttagttatgagggaaaaagcacaaaatttgtaggtgagccacatgaacacaaacatgttccaattgatggcagtcaggtttggtactatctgcaatttccgatgtccactgggggcttggaatgtatcccccatgaattcgtggggactattatactaggaattgggtatgtgatagaagcaccatgttcaaggcccttttcttggccttcagtctacttgatggagaatatgaattctgagggcctgataacatgaggtgaagaaggatcactgcatccagtcaaactgggatatggagatgggtactaaaatgagctaattcacagtcactaccatcattctaaaatgagggcagttcaggtgtgatgcatgtaaattgaattaagaaggagagggggaaaaacgaggtggctttacctgcatttttccacagggttccatccagtttaaggagacaaaacagttgaccttgatggagtagtagaagcagacaaaaggcttgttctgtggatggtgagactcccggtatagagtctcaggccagtcactcagtagaaccacatcattctttggttcttcatcattctgagagagaagaatgacctgagttaagagttctgagtccccactcattcactcatttcagaaatatttactggccaggtgtggtggcttgcacctgtaatctcaacactttgggaggccaaggcaagcagatagcttgagcctaggagtttgagaccaatctgggcaacacagcaaagccccatctctacaaaaaatacaaaaattagctgggcatggtggtgcatgactgtagtcccagctactcggaaggctaagtaagacaggaggatcgcttgagcccaggaggtcaggccacagtgagccatgactgtagcactgcacgccagcatgggtgacacagcgagaccctgtctcaataagtttaataaataaataaatatttactgagagatgagtggtcatttgttgtttttgagctaaccaacgtttaccctactactggaaagcagcactggaggggtcatccctccctcaccctcagtttgcaacagaatacatctgtatcaattggtctcttctacactttctcaaccaagtttccataaaaaaaagtaagccctcatgtcctaaagtatccaatctacataatgaattgatttctttcctagtcatctagaatgctactagttatgaggcattgagagaaatgagaaagtagcccctcaaatcatgttctgtgttccatgattcagatgaagagccacagttgagaaaggctgacaggttctatgaaagattctgagggtacagtgctgagcaaaacagacatggctctggctcttaagaagatgagtcagaggggaaacagacgttaaacaaataactaacaactgagtatacaaaacaagtaaatgcttacaaagaaaggaatacacggtggctcacccctgtaatcccagcactttgggaggccgaggcgggaggatcacaaggtcaggagaacgagaccatcctggctaacacggtgaaaccccgtctctactaaaaatacaaaaaattagctgggtgtggtggtgggcgcctgtagtcccagctactcgggaggctgaggcaggagaatggcgtgaaccccaggaggcagagcctgcagtgagctgagatcgcaccactgcactccagcctgggcgagagcgagactccatctcaaaaaaaaaaaaaaaaaaaaaaaaaaaaaaaagaaaggaatacaattctgtatgacagaggaacccaaccatggcaaatatgtatacctgtcacagttggaacaacttttttaagttccagcctacaccaaaaggaccactcttattagaattgcacacacgatacactgcctttgggaaactcatacttcacagtatgtaataggatgaccaccatgtgtggcagaccttgtcgcatgcacctctgtcactattctttctttatttatttatttagatggagtctcgctctgtcgcccaggttggactaaggtggcgcgatcttggcttactgcaacttctgcctcctgggttcaagtgattctcctgcctcagcctcccgagtagctgggattacaggcgcccgccaccatgcccggataatttttgaatttttagtagagacagggttttgccatgtttgtcaggctggtctcgaactcctgacctcaagtgatctgcccacctcagcctcccagagtgctgggattacaggcgtgagccactgtgctctgcattctgtcactattcttatgtgtacccaaggggaatgtgtgctatttacaacatggagttagctgtgtgtcagctcttctggccatgtggggtgtgtgtatatatatgtacctatcaagggagttacataccttgtaataggttacacagtagaacatatacaatacatgccaccttccagtgatgtagcagatgtctgtaatgtatgtacatgaagtcctcatgctgatcagccaaaactgagttcatgaagtttacttctggggtcacccttctcagtagctacttgaactatacccacctcctgaacaatgccccatggatctaactctccaagtttctctgcatcagaatttgtgctctgaccaactaagttggaaggtataatactaaatcaactgaagtattaaaacaactttacttataatgtccatcatacctgcttcctgcatccacaaaggatttgagactatactgaggccaatatctatctacaacttagaatctctcttctttctgtatttcttttttctttctctctctcttttttttctttagagacagagtcttgctctgttgctgttgacgtgactagagtgccatggtgtgatcatagctcactgtaacatcaaaatgctgggctcaagcaatctttccaccttagcctcttgagtagctgggactatagtcatgcaccaccacacttggataattttttttatttttgtagagatggggtctcgctatgctgcccaggctactcttgaactcctgggctcaagtgatcctcctgtcttggcctcccaaagtcctgggattacaggcgtgagccaccatgcccagccctacctgtatttcttattttcagatctcaagagcttacagcaccattgtcattgctgattcagtagcagtagcagagttgagtgaaaggaccctggtgtctgagctcccaacccctcatctctcttaatcagaaagctcatttacatacctcttattccattagttaatcatcattccttttctcctttccagcctttatgtacaaacaattcattcactcattaaatgagatcaacgctttgctatggaaaaaaactaagaatatcttaacgcaatgtatctgcctgatattactgctacctactctacatcaaatccttctccttcctcttccccctccttccatccgaatgaaattctgatttggcttagggcgatcatggacccagaaacttcagcaacatagagtactactatagtactccaaggctggcatggccctgtggctctctgagcttccctcttctatcttctatctacttgcaatttgaggctgatacctggaagtgcaacgactatcttgtaagcctaggataataagctaacataatagaaatggtggaaaagaaagaaaaagaatgcaggtccttgacaacacgtaggacaaagatgcctcttacttgtttaatccatataaatccattttctgttattgcagcagaaagtgttctaacttacctaatgcgatcatcttaatttagcaggggaagttattgggggatgtggaagggtctttcctaagttgcctatgtcttgcccatgccacagcctgccttggcaggaataattagtccagggccaccatgtgcacagctctcatacacatcacctttatgtccttcaggatcttatttatgaggaacttcaagttcttccactcaggaataagtctggatgaagatgatttcctagtgatatcccagctctttacagacatcttggattacagaacctgtggaaggtaaaggtctcttaatcaacaacatctaatgttagaacggaaattaagggaattgggaaagagggaagggcagcaagataaattagagaagtactcctttagaagccaggcgcggtggcccatgcctgtaatcccagcactttgggaggccaaggcaggtggatcacttgagcccaggaatttgagaccagcctggccaacatggtgaaaccccatctctactaaaaacacaaaaattagcttggcatggtggcacgtgcctgtaatcccagctactcgggaggctgaggcagaagaatcgcttgaacctgggaggaggaggttgcagtgggccgagattgcgccactgcactccagccttggcgacagagcgagactccatctcaaaaaaaaaaaaaaaaaaaaaaaaaaagaagtgctcccttagaaacaggagaaactcctttgttttaaaaaagataggaatagaagaggccttggggaggagccaagatggccgaataggaacagctccggtctacagctcccagcgtgagcgacgcagaagacgggtgatttctgcatttccatctgaggtaccgggttcatctcactagggagtgccagacagtgggcgcaggccagtgggtgtgcgcaccgtgcgcgagccgaagcagggcgaggcattgcctcacctgggaagcgcaaggggtcagggagttccctttctgagtcaaagaaaggggtgacggacgcacctggaaaatcgggtcactcccacccgaatactgcgcttttcagaccggcttaaaaaacggcgcaccacgagactatatcccacacctggcttggagggtcctacgcccacggaatctcgctgattgctagcacagcagtctgagatcaaactgcaaggcggcagcgaggctgggggaggggcgcccgccgttgcccaggcttgcttaggtaaacaaagcagccgggaagctcgaactgggtggagcccaccacagctcaaggaggcctgcctgcctctgtaggctccacctctgggggcagggcacagacaaacgaaaagacagcagtaacctctgcagacttaaatgtccctgtctgacagctttgaagagagcagtggttctcccagcacgcagctggagatctgagaacgggcagactacctcctcaagtgggtccctgacccctgacccccgagcagcctaactgggaggcaccccccagcaggggcacactgacacctcacacggcagggtattccaacagacctgcagctgagggtcctgtctgttagaaggaaaactaacaaacagaaaggacatccacaccgaaaacccatctgtacatcaccatcatcaaagaccaaaagtagataaaaccacaaagatggggaaaaaacagaacagaaaaactggaaactctaaaacgcagagcgcctctcctcctccaaaggaacgcagttcctcaccagcaacggaacaaagctggatggagaatgactttgacgagctgagagaagaaggtttcagatgatcaaattactctgagctacgggaggacattcaaaccaaaggcaaagaagttgaaaactttgaaaaaaatttagaagaatgtataactagaataaccaatacagagaagtgcttaaaggagctgatggagctgaaaaccaaggctcgagaactacgtgaagaatgcagaagcctcaggagccgatgcgatcaactggaagaaagggtatcagcaatggaagatgaaatgaatgaaatgaagcgagaagggaagtttagagaaaaaagaataaaaagaaatgagcaaagcctccaagagatatgggactatgtgaaaagaccaaatctacgtctgattggtgtacctgaaagtgatgcggagaatggaaccaagttggaaaacactctgcaggatattatccaggagaacttccctaatctagcaaggcagaccaacgttcagattcaggaaatacagagaacgccacaaagatactcctcgagaagagcaactccaagacacataattatcagattcaccaaagttgaaatgaacgaaaaaatgttaagggcagccagagagaaaggtcgggttaccctcaaagggaagcccatcagactaacagcggatctctcagcagaaaccctacaagccagaagagagtgggggccaatattcaacattcttaaagaaaagaattttcaacccagaatttcatatccagccaaactaagcttcataagtgaaggagaaataaaatactttacagacaagcaaatgctgagagattttgtcaccatcaggcctgccctaaaagagctcctgaaggaagcgctaaacatggaaaggaacaactggtaccagccgctgcaaaatcatgccaaaatgtaaagaccatcgagactaggaagaaactgcatcaactaacgagcaaaatcaccagctaacatcataatgacaggatcaaattcacacataacaatattaactttaaatgtaaatggactaaattctccaattaaaagacacagactggcaagttggataaagagtcaagacccatcagtgtgctgtattcaggaaacccatctcacgtgcagagacacacataggctgaaaataaaaggatggaggaagatctaccaagcaaatggaaaacaaaaaaaggcaggggttgcaatcctagtctctgataaaacagactttaaaccaacaaagatcaaaagagacaaagaaggccattacataatggtaaagggatcaattcaacaagaggagctaactatcctaaatatatatgcacccaatacaggagcacccagattcataaagcaagtcctgagtgacctacaaagagacttagactcccacacattaataatgggagactttaacaccccactgtcaacattagacagatcaacgagacagaaagtcaacaaggatacccaggaattgaactcatctctgcaccaagcagacctaatagacatctacagaactctccaccccaaatcaacagaatatacgtttttttcagcaccacaccacacctattccaaaattgaccacatagttggaagtaaagctctcctcagcaaatgtaaaagaacagaaattataacaaactatctctcagaccacagtgcaatcaaactagaactcaggattaagaatctcactcaaagccgctcaactacatggaaactgaacaacctgctcctgaatgactactgggtacataacgaaatgaaggcagaaataaagatgttctttgaaaccaacgagaacaaagacacaacataccagaatctctgggactcattcaaagcagtgtgtagagggaaatttatagcactaaatgcccacaagagaaagcaggaaagatccaaaattgacaccctaacatcacaattaaaagaactagaaaagcaagagcaaacacattcaaaagctagcagaaggcaagaaataactaaaatcagagcagaactgaaggaaatagagacacaaaaaacccttcaaaaaatcaatgaatccaggagctggttttttgaaaggatcaacaaaattgatagaccgctagcaagactaataaagaaaaaaagagaagagaatcaaatagacacaataaaaaatgataaaggggatatcaccaccgatcccacagaaatacaaactaccatcagagaatactacaaacacctctacgcaaataaactagaaaatctagaagaaatggatacattccttgacacatacactctcccaagactaaaccaggaagaagttgaatctctgaatagacaaataacaggagctgaaattgtggcaataatcaatagtttaccaaccaaaaagagtccaggaccagatggattcacagccgaattctaccagaggtacaaggaggaactggtaccattccttctgaaactattccaatcaacagaaaaagagggaatcctccctaactcattttatgaggccagcatcattctgataccaaagccgggcagagacacaaccaaaaaagagaattttagaccaatatccttgattaacattgatgcaaaaatccttaataaaatactggcaaaccgaatccagcagcacatcaaaaagcttatccaccatgatcaagtgggcttcatccctgggatgcaaggctggttcaatatacgcaaatcaataaatgtaatccagcatataaacagagccaaagacaaaaaccacatgattatctcaatagatgcagaaaaagcctttgacaaaattcaacaacccttcatgctaaaaactctcaataaattaggtattgatgggacgtatttcaaaataataagagctatctatgacaaacccacagccaatatcatactgaatgggcaaaaactggaagcattccctttgaaaactggcacaagacagggatgccctctctcaccactcctattcaacatagtgttggaagttctggccagggcaatcaggcaggagaaggaaataaagggtattcaattaggaaaagaggaagtcaaattgtccctgtttgcagacgacatgattgtttatctagaaaaccccatcgtctcagcccaaaatctccttaagctgataagcaacttcagcaaagtctcaggatacaaaatcaatgtacaaaaatcacaagcattcttatacaccaacaacagacaaacagagagccaaatcatgagtgaactcccattcacaattgcttcaaagagaataaaatacctaggaatccaacttacaagggatgtgaaggacctcttcaaggagaactacaaaccactgctcaaggaaataaaagaggatacaaacaaatggaagaacattccatgctcatgggtaggaagaatcaatatcgtgaaaatggccatactgcccaaggtaatttacagattcaatgccatccccatcaagctaccaatgactttcttcacagaattggaaaaaactactttaaagttcatatggaaccaaaaaagagcccgcatcgccaagtcaatcctaagccaaaagaacaaagctggaggcatcacactacctgacttcaaactatactacaaggctacagtaaccaaaacagcatggtactggtaccaaaacagagatatagatcaatggaacagaacagagccctcagaaataacgccgcatacctacaactatctgatctttgacaaacctgagaaaaacaagcaatggggaaaggattccctatttaataaatggtgctgggaaaactggctagccatatgtagaaagctgaaactggatcccttccttacaccttatacaaaaatcaattcaagatggattaaagatttaaacgttagacctaaaaccataaaaaccctagaagaaaacctaggcattaccattcaggacataggcgtgggcaaggacttcatgtccaaaacaccaaaagcaatggcaacaaaagccaaaattgacaaatgggatctaattaaactaaagagcttctgcacagcaaaagaaactaccatcagagtgaacaggcaacctacaacatgggagaaaattttcacaacctactcatctgacaaagggctaatatccagaatctacaatgaactcaaacaaatttacaagaaaaaaacaaacaaccccatcaaaaagtgggcgaaggacatgaacagacacttctcaaaagaagacatttatgcagccaaaaaatacatgaaaaaatgctcattatcactggccatcagagaaatgcaaatcaaaaccactatgagataccatctcacaccagttagaatggcaatcattaaaaagtcaggaaacaacaggtgctggagaggatgtggagaaataggaacacttttacactgttggtgggactgtaaactagttcaaccattgtggaagtcagtgtggcgattcctcagggatctagaactagaaataccatttgacccagccatcccattactgggtatatacccaaatgactataaatcatgctgctataaagacacatgcacacgtatgtttattgcggcattattcacaatagcaaagacttggaaccaacccaaatgtccaacaatgatagactggattaagaaaatgtggcacatatacaccatggaatactatgcagccataaaaaatgatgagttcatgtcctttgtagggacatggatgaaattggaaaccatcattctcagtaaactatcgcaagaacaaaaaaccaaacaccgcatatactcactcataggtgggaagtgaacaatgagatcacatggtcacaggaaggggaatatcacactctggggactgtggtggggtggggggaggggggaggggtagcattgggagatatacctaatgctagatgacgagttagtgggtgcagcgcaccagcatggcacatgtatacatatgtaactaacctgcacaatgtgcacatgtaccctaaaacttaaagtataataaaaaaaaaaagataggaatgaaaatgaactactagtatttgcaacaacatagatgaaactcaaaaacttaatactgagtacaagaaggcagacacaaaacagcacgtattgtatgattccatctatatgaaattctagaaaagagtcatctaggccgggcgcagtggctcacgtctgtaatcccagcactttggggggccgaggcaggtggatcacgaggtcaggagttggagaccatcctggccaacatggtgaaaccccatctctactaaaaatacaaaaattagccaggcgtgatggcgtgtgcctgtggtcccagctactcagaaggctgaggcaggagaatcgcttgaacctgggaggcggaggttgcagtgagccaaaatcatgccactgcactccagcctgggtgacacagtgagactccgtctcaaaaaaaaaaaaaaaaaaaaaaagtaatctagccaacagggccagaaagtagatcagtggttacatggggcaaagatttaggaggactgagtgggaagggatgaaagggaactttttgtagtcttgtaatgttctgtatcttgactctggtagtggttacatgggtatagaaattggtcaaaactcatcaaaaaaatatggtatactttattacatgaaaattatacctaaataaatttgattttatttgtttgtttagaaagtcttgctctgacactcaggctggaatgcactggagtaatcaaagttcactgtaacctgcaactcctgggctcaagggatccttctgccttagcctcccaagtagcttggactacaggcacatgccatcatgctcagctaatgttttattttttgtagaggtggggtcttgctatgttgcccaggctggtctcaaactcctgccctcaagcagttctcctgcctcagcctcccaaagtgctgggattacaggtgtgagccaccacactcggccttaatttcatttttaagagggaatagagtgacctggcacaatggctcatgcctgtaatcctaacactttgggaggctgaaacggaaggatcacttcagctcagaagtttgagaccagcctgggcaacataatgagaccttttctctaaaaaaattttcaaaaattagccgggtgtggtggcaagtacctgtagccccagctactcgagtacctgaggcgggacaagtgcttgagcctgggaggtcaaggctgcagtgagttgtgatcatggcaccgcactccagcctggatgataaagcgagaccctgtcctaaaaaaagaaaaaagcgaggcgtggtggttcatgcctgtaatcccagcactttgggaggccgaggcgggtgaatcacaaggtcaggagttaaagaccagcctggccaagatggtgaaaccccgtctctactaaaaatacaaaaattagccgggtgtggtggtgcatgcctgtaatccaagctactagggaggctgaggcaggagaatcgcttgaacccgggaggcggaggtttcagtgagccaagattgcgccactgcactccagcctgggcaacagagcaagactccatctcaaaaaaaaaaaaaagaaagaaaaagaaaaaaaggccgggtgcagtggctcttgcctgtaatcccagcactttgggagaccgaggcaggcgcatcacaaggtcagcgtcaagagatcgagaccatcctggccaacatggtgaaaccctgtctctactaaaaatacaaaaaattagctggtcatggtggtgcacgcttgtagtcccagctactcaggaggctgaggcaggaggatcgcttgaacctgggaggcagaggttgcagtgagccaagattgcaccactgcactccagcctggcgacagagcgagactccatctcaaaaaacaaaccaaaaaaaaaaaaaaaagaaagaaaaaagaaaaagaatagagtgaagtgggtgctttatatagtctagaaacagaacaaaaaatacattaagtaaagctttcaggtgagtttaggtgagccagctgtagcttagctgaaataatgcaggggcctagccctcccttagctctctttattaggaatctaatatttgtggacataattatatttattaaccatcatccttctttcctacggaagtcctcatatatgtaaaagtcacccactttccacaaatatttcctcacggctcattatatgccgactgtgctgagagctagagatgaagcagggaagaagaatgagtatctgcctggatggggtttactgtctagcatagaagacaggcactgaacaagttcatatagatatccaattatgacaagatgccaggctaaaataacctgaaagcctcacactacaaaatccgagaaattctgggtaaaataacaagtacctgagcttcaggaaccagaaactagggaagtagagggtaacccacagcaacaagtgctgactactgttgtgctggtcctgagaaggtgtagttaccagagcccataaagaccacaaatatcaatgaccacaatggctagtggcttggatagtattgccctggtaaagagaagacccaggactcgggccaatgatagggagttggaattaaaacccttccatgaagcactggaatgcttgacaaaaacaaacctcagagagagagacttccacagacagagctgactcatgaccagcttcctgaaagcttacacttctttaaacttttatccaggcataccccaaattcacagggatacctatcacgttctccaaatgattctctgacatgtccctcacttggactgacaagggagaaaagaaagaaggagaaacaccacagagcacatcaacaattctctctggagaaatcatcattttaatttttatacccaagaggataataatttaagagtcacaaaaaaaatccttcacaatctcttagcatgctcttcatatgttatcaaacacctactgatctcaaataaaactcccagaacacggaaagtcagatttaacattctgttatatgtgtatattaaaaatgttaaggaaactaccataaagaaaaaaaacaaaaacagaggccgggcatggtggctcatgcctgtaatcccagcactttgggaggccaagatgggcagatcacctgaggtcaggagttcaacaccagcctggccaacatggcaaaaccccacctctactaaaaatataaaacttagccgggcatggtagcatgcacctgtagtcccagctactcgggaggttgagtcaggagaatcacttgaacctgggaggtggaggttgcagtgagccgagatcgctctaatgcactccagcctgggtgacacagcgagactccatctcaaaaaaaaaaagagagagagaaagaaagaaaaaaaacaaatagaatgcatgattttaccagttgaggaaaaggggtatgaaataaagaaaacattagaaaacattaaccaattcaatattagaaataaaataagaagggaaaaagaggtatgatatatagaaatgaggtgatagaaacaaatctttcattatcataataaatatagattaaactcatcacataaaagagagaccaaattgaatatttaaatgaattaagtacgtgctgtttataagagaaaaatctaaaacgtaagacatagaaactttacagtatcatgggcttctgttccttaaaatgatctgaaagcaataaggagagtaaaaaaaatctttgcaagctcaacattcagcaaaacaaggagaagtataatctgtagacaacaaattacatgtaaaagttgggaaaagcagctcaaatgaggaacaactatagggaggaagtggagacaagaaactatgcaaagaaatttgagcagaaagaaagacaaacagaagcagatataagaaaacacctgtggtggctcacgcctgtaatcccagcactttgggaggccgaggcgggtggatcatgaggtcaggagatcaagagcatcctggccaacatggtgaaactttgtctctactaaaaatacaaaaattagccgggtgtggaagtgtgtgcctgtagtcccagctattcaagaggctgaggcaggaaaattgcttgaacccgggagatggaggttgcagtgagccgagatcgtgccactgcactccagcctgggcgacaaagcgagacttcatctcaacaaagaaaaaaaaaaaaaaagaaagaaaaagaaaaagcaaaggaaaagaaaacacctgggaaattaaatttcctacaggtgaggagtccaccgtcaggtagggatctatacctcttgtttgcaactacactgtaagaaactggaaagcaaaaacagaggagacagagttgatcagtctcctacaaaagccatatgtgaggcagaaggaacctcttaaaagaaaaactcatccaggaaaacccaacttaggcaatgttctgcaagaaaaaagggactagctacattaacccaaaactacaaaacgaactctgaaggaaagagtaacaaagtaaactaacatatgaagagctttcactggaaaactgcctcaatggatcagataaaaattataactaggccaggtgtggtggcttttgcttgtaatctcagcacttcaggaggctgaggtgagaagattgcttcagcccaggagttcaagaccagcctgggcaacatagcgagaccccgtctctacaaaaaataaaaaactagccaggagtggtggcatactactgtagtctcagctactcaggaggttgaggtgggaagattgcttgagccctggaggttgaggctgcagtgagctatgatctcaccactgcactccagcctggacaacagagtgagacactgtctcaaaaacaaaaaaaaattataaccaaatattttgccgtgaatgaaaaaaaagacttgatgcaatttcctctgtgatggaagaccacaaagcaaaaatataaaaatccagggaggagatgctgaaagaacagggtaagaacaaatagagagcaggcagaaatcgaagaaaaatcaagtatcacaagcataaggacaaaagttgaaagaacacaagggagaaaaacccagtgaagaacctggaggacaaaaatgggaaaagcaggccgggcgtggtggcttacacctgttatcccagcactttgggaggccgaagcgagaggatcacttgaggtcaggagttcaagaccagcctggcaagcatggagaaaccccgtctctactaagaaatacaaaaattagctgggcatagtggtgtgtgcctctaatctcagctacttgggaggctgaggcaggagaatcgcttgaacccaggaggcagaggttgcagtgagccgagatgggaccactgcactccaacctgggcgacagaacaagattcagtctcaaaatgaaaaaacaaacaaacaaaaaaaacaaacaacaacaaaaaaaaaccagaaagaattacttagaaaatatgtagtttcaacaaatgttgctgggacaactgaatatctacatgcagcataataaatttggacttctacctcaaaccattaaaaaaattagcacgaaatagatcaaatacctaaatataagaactaaaaccaggaatctttgtcactttggactaggcaacggtttcgcagacatggcaaaccataagcaactaaaaaaaaactggacttcatcaaaattaaaaacctttgtgcactaaggaaaggacactattaaaaaaactgaaagatttcacacaggtccaagatttgctgaaaaaggaaaaaaaaagaaagaaaaagtgaaaagacaacccacagaatgagagaaaatatttgtaaatcatgtatctaatacgggcctagtatcctgaatatataaagaactgttacaactgaactacaaaaaggcaaataacccagttaaaaattggacaaaggatttgaatagaaattactacaaagatatatacaggctgggtgaggtggctcatgcctataatcccagcactttaggaggccaaggcaggcagatcacctgaggtcaggagtttgagatcagcctggtcaacatggcgaaaccctgtctctactaaaaatacaaaaatgagccaggcgtggtggcatgcacctgtactccccgctatttgggaggctgagacaggagaatcccttgaacctgggaggcggaggttgcagtgagccgaaatcgtgccactgcactgtagcctgggagagccagatttcgtctccaaatatatgtgtgtgtgtgtgtgtgtgtgtgtgtgtgtgtatacaaatggctaagagccacatgaaaagatgctcaacatcactggttattagggaaatgcaaatcaaaacctcaataagatacttcacatctaccaagatggctttaattttttttaatggaaaataacaagtgttggcaaggaaatggagaaatgggtaccctctgacattgcttgtgggaatgtcagatggtgcagtggctgtggaaaacagtatagtcaattgttttaatttaatgttgtcttggtatcaattttaaatacaagtttaactttctcatacaagaaacaggaatcagtcacccttgacacagttttcagttccataccacacctaaaggactcaggacggtggccagagataagaacttagaggcatctctcccacctagaagactgggctccctgcggttccacagcttcctttaaaataatttgtcggctgggagcaatgactcacacctgtaatcccagcacgctgggaggctgaggcgggtggatcatttgaggtcaggagttcgagaccaacctggccaacatggtgaaaccctgtctctactaaaaatacaaaaaattagctggacatggtggcgggcacctgtaatcccagctactttggaagctgaggcaggagaatctcttgaacctaggaggcagaggttgcagcgagccaagattgtgccactgcactccagcctgggcaacagagtaagacactgtctcaaaaaaaaatttattatattaaataaataataataataataaataataaataaaataaaataattcgcctatgggccaggcacgatggctcatgcctgtaatcccagcactttgggaggccaaggtgggtagatcacttcaggtcaggagttcaagaccagcctggccaacacggcgaaaccccagctctattaaaaatacaaaaattagccaggcatgttggtgcacgcctgtagtctcagctacttgggaggctgaggcaggagaattgcttgaacgcaggagacagaggttgcagtgagccgggatcagacagaacaaaactccatctctaaataaataaataagcctgtgaacttaaagtgatccacaccctgttcccttatatatactgccagtttcttctctctttctctctggccacctgactcttcattcctgccttgcatgttccggggacatctggactgccttccagactcactgtgccttccctgcccaggatctgtaagtaaaaaaatctttgaacctgttttctattgtggtaatgtgttggatttgcaccttccatctaaaaaactaggggctgcctcaggctgggtttccccaaggatgcgagagggaacataacgctgggctcccggtgtcagagctggggcatgggtcagacaagagccacaaggacatctgccagtataaacaagtttcctgcacaaagtttcccctggtcatgggtgggacaactgagagtcaggatgtctaccaggtaaaagaaatattctaggccaggtgtggtggctcacacttgtaatcccggcactttgggagaccgaggtgggaggatctcatgagtctgggaatttgagaccagcctaggcaacagagtgagacatcatctcaaaaaaaaaaaaaaagtattctgtgaaagtcacactgtaaacacccatatccagctccccttcatttcccattaggtttaggattgctagctgctctggtactggaacccaattttttttttttttttttttttgagatagagccttgctctgttgcccaggctggagtgcagtggcactatctcagctcactgcaacctctgcctcccaggttcaagtgattctcctggctcagcctccagagtagctgggactacaggagtgtgccatcacatccggctaatttttgaattttcagtagagacggggtttcaccatgttggccaggctggtctcaaactcctgacctcaagtgatccaaccacctcagcctcacaaaatgctgggattacaggggtgagccaccttgatttttttattattaagttcaacatacattagattactctgtaaaactgctataaaagttcctaaatgcttactctgaatttctgtacttatcttgtggaggagaaggacaaatagctcccagctgacaccagtgtgctaatggaggacctcctttgggatttctatccctagctgaacaattctagccctttcttttccacctagcaagagtcactacctctttttcttcttttatcttactaaatttctaccataagtaaagcttatttattttattattatttttagatggattctcactctgtcacccaggctggagtgcagtggtacaatctcggctcactgcaaactctgcctcctgggttcaagcaattttcctccctcggcttcctgagtagctgggattacaggtgtgcaccaccatggctggctaatttttgtatttttagtacagacagggtttcaccatgttggccaggctggtctggaactcctaacctcaggtgatctgcctgcctcggcttcccaaagtgctgggattacagccatgagccaccacacccagcctaccataagtaaagtttaaactttccaaaatcctgcatacaactctcaagtacatgcaagggaagaccaagtggcccctgcaaagaaggattttttaaaatgagaaaattaaacatatttaaaagtcaaggggaagaagccactaagaagggagagtgaaagtacaggaaagagagagtgggctgctacagcaagctgatgtgtgaagagaaataagagttcgatcccacaatctcagagccttcccaaagtttcctctggtgatttacgactaggagctctaactgggaaaatgggggtttcctgacgcttctaaatcttagactaagacttcattccattaagtttttggtgagagtcagatatttcactttaacccttcttgacctcagagaaattccctgttctttttccctactaaagcatttagaaaaagagaggctgggtgcagtggctcatgcctgtaatcccagcacttttggaggccaaggcggatggatcacctgaggtcaggagttcatgaccagcctggccaacacggcaaaaccccatctcttctaaaagtacaaaaattagcatgcacctgtaatcccagctatttgagaggctaaggcaggagaatcacttgaaccttggaggcggaggttgctgtgagctgagatcgccccactgcactccagcctgggcgacagtgagactttgtctaaaaaaaagaaaagaaaaagacagtgagataatgaaataaaaatgcattataattttaaaatgcagtattaatgcagggtgctattaagtatgagagaagtgaggggcacactgaaatcaagggagaatgagatggaacagaaactttagagtcaaatagacttacatttaaaaagctagattttccccttcaactttttttcctttggacttttcagattgaacaaagttttatctcatctatggcagacgtcttaatgaggtcagtgggaccaatgccactcaatatacattcgccccatggggaaaacctgttactaacatcatacaaacatcataggcttcccctctgaatctccattgcctcctggctcacacacagaggattacatgcccctagttctagaagagacagactccagctacaatttcccctagaaagagtgtcactggcttcaacatcataatgcctcggactcccccagcccctcccccatatgtccagtgaaagcagcaacatgaagagcatgaaaatccccacatgaatatgccaagcgctgggaggcaggggaaatctggtagtttgtgatagtggaaaggggtcactacattgcggtgggatggcgagatttaaactgtccttttatgacagaatgactttctgagggctggccatttgagatcctacagccggatgagtagagacactaatatattgtgagggagggcagggagtgtgacccttttatctaaataaactttattgtgtgcttacatgtgccagacactgctctaggaactgttcatgccttgtctccaaacactgccttaaagcagggctgccagataaaatacagttacatttgaacttgatgcccggttacatttgaatttcagtgaaaaatatttgggagatacatgctaaaaaattctgttttctttttctttgttttgttttgttttgttttttgagatggagttttgcttttgttgcccaggctggagtgcaatggcgcaatggcagctcaccgcaacctctgccttccgggttcaaacgattctcctgcctcagcttcccgagtatctgggattacaggcgccggccactacgcccagctaatttttgtattttcagtaaagacggggtttctccatgttggtcaggctggtcccgaactcctgatctcaggtgatccgcccgcctcggcctcccaaagtgctgggattacaggcaggagccacagcgcccggcccttgttttcttttttaactgacatccaaacttaattgggtgtcctccattttaatttgctaaataaaatgtggcaatactacttaaagctactatcattccccttcctccaggtgaggaaatgccccaccacacagccagaatgtggcagggcgaagagtcagactccagacatgtgctgagccattatgccattgtcccgcctggccgtgctgggatgtgcatgggacgctctggcctttgtgacagaggccttgcatcagcggtttgcaagcatggccggctctttacggttctacggggtccccatgcagcccttcataaaggcaacgcttgagttccaccaggccggaagaagccatgaaacaaaagctatgagaaggccgggcgcggtggctcacgcctgtaatcccagcactttgggaggccgaggcgggcggatcacctgaggtcaggagttcaagaccagcctggccaacatggcgaaaccccttctctactacaaaaattagcccggcatggtggcgcgtgcctgtcatccaagctacaaagtaggctgaggcaggagaatcgcttgaacccgggaggcggaggctgcagtgagccgagatcgcgccactgcactccagcctgggcaacagaggcgactctgtctcaaaaataacacacacacacacacacacacacacacacacggaaaacacggccctggactccgtgtatagaacctggtgtctcagggcgttgggcaggagcagaggcaggtgtctaagccggaccattggctcccttccgcgccagcccggtgtgctatgagaaccttgttgccgcctagctgaagctgggaaaagcagccgccgcactttggcgagaaagcacgcggaacccaccgaacgcgcatgcgtgcaagccagggcggggctagggcgcgcgcgcaaaggaggggctctaccatccgcggagccacgccctccgtcacatcccacctccccgcccaggagcttccgcgaggctcgcccggcagctcctgctccacagcaggcttcctactttgacgcctcacgcgctcttcagctctctttttctgtgggtctcgcggctctccccctctacaattacgagtagtgccttgagccgggcgttcggagacccacacaggagggacaggatggggagagcggcattaaagggtggtgactcaggagttcaagaccagcctggccaacatgacgaaaccccgtctctaccaaaaatacaaaaattagccaggcatgatggcggacgcctgtaatcccacctactcgggcggctgaggcaggagaatcgcttgaacccgggaggcggaggttgcagtgaggcgagatagcgccactacactccagcctgggcgacagagcgagactccgtctcaaaataaaaataaaaaaaaaataaaggcggggtggtggtggtgacaagcccctattacggccttagtgcgggattccccttggggcgggagacgtcgtccttccgggtgcgggtgcggactgcaagtcctatcggggaccgcgacaccggactgcatccgccagcgtccagggcgtagcgccccccaggcgctgccttcgtccatctctacggggagtggcggccagaagactgggttttccccgtgcagctgtgccccacgttggggaaactgacttttcaggtaagatcccttccaagttccatggatttcgcctttccctttaacctgttccccagcgtcctctggtgatagcagatgagggtggtgacaggaatactaaagttccccatctgcctcgtgttggaagtctccatggtgttcacctccccaatgttgcctgcaagtagataggagcagagatggtacttggggaggtgaccggaactatggctcctaacatacagggcgttgggaactacggctcctaacatacaactctcagtttgccccgtctgtagctccctgtatttcgtctctccctccccctcaaagttcccaaagagaaaaggtggaggcgacaggtggattgcagctctcaggagatcctgtgggaagagggagccttcccagcaggcgccaggcggtggcttccgctccctaagtagccaagctgcaccctggcccgcatgtggctggagaaaagtgcactgccaccctgctcccgctttcaagttataaccacgaacctcaagtagttcttagtgctcccccgcagacacactgtttagggttttgttgtgtttttagtccactcactgccaaacacaacttttcaaaccgaccgcacactcccattgcctccctctaggctaataagtgcttcttcactgagaaaaccaaagctatcagatgagattctctacagactcccagcaccatgcctacctatctgcatctctgctcatatacactgcctctcctctcttgccgcaaatgaactaaccatgttcttatctaaagtccattcagcaattaggcactagattccacccccttttatctgtccagtttttgtttgtttgtttagacggagtcttgctctgtagcccaggctggagtgcagtggtgcgatctcggctcactgcaacctctgcttcccgggttcaggtgatccttccacctcagcctcctgagtagctgggactacaggcatgtgccaccacacccagctaacttttgtatttttagtagaaacgtggtttcaccatgttggccaggctggtctcaaactcctgacctcaagtggtccacctgcctcggcctcccaaagtgctaggattacaggtgtgagccagcgtgcccagccaaaagcaggagctctgtccagttcttgactccagcaattccctcaccttgaaaacaaacaacgcacacacgctcgcgcgcacacacacacacacacacacacgttaaaaaattcccctactcccatcaaccactgctccattccaggcagaactcatagaaagtattatctatatttcctgcctctaatttctcttttcttgtcctctattgaacccattccaattacacttcagcatctgtcactaccagaactgtccttgtcaaggttaccaacaatcatcttgctaaatttaatggttgactttcgattgttattctacctgacctgttggcagcacttaacacaaataatcaccccctcctccttaatacactttcttcacttagtttccttgacatcacgcattcttggttttctttctacctcattagcctctccttctccatcttctgtactgattcttccacttttctttaacctgttaatattgatgctcctccgaactcaatctttgttcctcttccttatccacactcccttggtcatctcatccagtctcatggctttaggtatcttctcatctggggttcataatatggccccttgttacttttttttttttttgagacacagtcttcactctgtcacccaggctggagtgcagtggtgcaatctcagctcaacgcaacctcctcctcccaggttcaagcaattctgcctcagcctcccaagtagctgagattacaagcgcccgccaccacgcctggctaatttttgtattttcagtagagacggggtttcaccatgttggccacatgggtctcgaacccctgaccttcagtgatccgcccgcctcggcttcccaaagtgctgggattaccggtgttagccatcgcgcccagcctactttctgatctcattttctgttactctcctcttcactcaatttgctgcaggtatactggcgtttttgctgttcttccaacctgccaggcacctcattggtatcaatgtttgccacatttataactccagctcatacctttcccctcaactccagagtcatatatccaattgcctattagacaaagtaaacatctaataggcctcttaatctcaatttgtccaaaactgaatttatgagttcctaatcttccttccggtatccacttccttgttaatctgccccaacacgattgtacctccagccttccaactgttcaagccaaaaaaccctgaagtcatcattaactcttccttttcgctcatacccacacccagtcttatcagtaaatccttatggctcatcctccaaatagatccagatctgcccaatagtcctctttcccctagattactgtagcagactcttcattcattccgctgcttccactccccttccctggatttctgcctacctcactgcaatctagtctctacatagcaatcaaagtgctttttaaaaatgtaagactgcaacactcctcggctcaaactctcccatggtttccatctcttgcagagtaaaagccaagaccttaaaatggttccaaagtcccaacataatctggccccgttactccaggaacactggcctttttgctgttttccaaacctgccaggtaccttattgccattgttttgccattgtagataagcgtatttatttatttattttatatatatattttttgagacagagtttcgttcttgttgcccaggctggcgtgtaatggtgcagtctcagttcactgcaacctctgcctccggggttcaagcgattctcctgcctcagcctcccaagtagctgggattccaggcatgcgccaccacgcccggctaattttgtatttttagtagagacggggtttctccatgttggtcaagctggtctcgaactcccaacctcatgtgatctgcccgcctcggcctcccaaagtgctgggattacaggcatgagccacggcgcccagccatagataagcttttgatttgcttgtaaccaataaaaaatgtttttaaaaaaatcagccaggcacaatggcgtacacctgtaatcccagcattgaacccaggaggttgaggtggcagtgagcatgattgactgtgccactgcacttcagcacggatgacagaccaaaaccctgtctcaaaacaaacaaacaaaaaagtctaatctgtaaggagcaggagaaataggatgttttttttttgagacagagtctcgccctgttgcccaggttgtagtgcaatggcgtgacctcggctcactgcaacctctacctcccgagttcaagcgattctcctgcctcagcctcctgagtagctgggattacaggtgcaccccaccacacccggctaattttttgtatctttagtagagacggggtttcaccatgttggccaggctgggttggccaggctggtctcgaactcctgacctcgtgatccacccgcctcagcctcccaaagtgctgggattacaggtgtgagccactgcgcccagctgagaaatagaattttttaaaagtatgtggtatatatttattggtattaaagttttataattagctgaaggttgaagctattgatattaaaggttcagtggctttatatgctatctatttattgtatatgccatttattggaattaaggttctataattagctaaaggttgatagtattgtttagatccttgggatcttttctttctctgattaaatctctcaaccatttatttctctctgcctttctgttaaaatatccaaaagcaggccaggtgtggtggctcacacctgtaatcccagcactttgagaggctgaggcaagtggatcatttgaggtcaggagtatgagaccagcctggccaacatggtgaaaccctgtctctacggaaaatacaaaaattagatgggtgtggctgggcatggtggctcacgcctgtaatcccagctctttgggaggcctaggtgggtggattatgaggttaggagttcgagaccagcctggccaacatagtgaaaccccatctctactaaaaatacaaaaattagccaggcaggatggcaggtgcctgtaatcccagctacttgggaggctgaggcaggagaatcacttgaacctgcgaggcagagattgccgtcagctaagatcacgccactgcaccactccagcctggatgacagagaaagactccatcttaggaaaaaaaaaaaaaaaggtgttacaatttcttattgagtattcaaatttccaacaatctgtttctccttatggttttgtcactttgctatattttaggcaggattgttagctgcctgtttaagattaacatttttccttctgttgtactttttattagatttttctttgtcctttattattttttatgtttttatacatatatcatagttgtacatatttgggggggtacatgtgctatttcgatacctgtaaacaatgtggaactatcaagtcagggtaattgggatacccatcacctcaaacatctgtcatttcttttcttttctttctttttcttttctttctttttgagacagtctcactctgttgcccacgctggagtgcagtggtgcaatctcggctcactgcaacctctgcctccagggttcaagcaattctgcatccacctccacctagtacctgggattacaggcacatgcgccaccatgcctggcttatttttgtatttttagtagagagggggtttcaccatgttggccaggctggtcttgaactcctgacctcaggtgatccacccacctcagcctcccaaagtgctgggattacaggcgtgagccaccttgccaggccgatttgtcttttctttgtgttgaaaacattacagttcttctcttctattttgaaatatataataattgttcactataatttccctactgtactatcgaatattagattctatataactgtagttttgtacacattaaccaaccaacttctctttatgtaccctctctccccttcccttcccagtctttggtaaccaccattttactctgttttatcttgactttaaattttgttttgtgagctagtaggactgctactttaggtgtcttttaattcatatttatgtagcatataattttacttccttttattttcaagctttctttttattttaaatgtattattccttgacaacatattattggaccttggtttttttaatccagtctgaaagtctctgccttttaaagggtaagtttggctggacgtggtggctcatagtggctagccaacatggtgaaaccccgtctctaccaacaatatacaaaaattagccaggtgtggtggtgcatgcctgcagtcccagctactcgggagactgaggtgggagactcccttgaacctggaaggcagaagttgcggtgagctaagatcatgccactgcactccaggctgggtgatgcccagccccctatttatatcttaaatttatcactatttgtaccttctgtgtcagtctcgatccacttaagaaatataaaacacacagtgggctaaacaaaagaaatttaatataaaaagtttttaaattctgatcaaataatgattacaggccgggcgcggtggcttacggcgtaatcccagcactttgggaggctgaggcgggcagatcacctgaggtcaggagttcgagaccagcctggccaacatggtgaaaccccgtctctactaaaaatacaaaaattagttgggcgtggtggcagacacctgtaatcccagtttcttgggagactgaggcaggagaatcacttgaacccgggaggcggaggttgcagtgagccgagatggtgccattgcactccagcccgggtgacagagcaagtctcaaaaaaatatatatatatattacaagctataaggaaactccatatggcaacctaggactaagagagaatactcaaagaaggacaaacttggaaaagggctccctccccaaagctggagttcagacgtaactggagaagacaaagcccattagccaagcaccgtggctcatgcctgcagttccaggtacttaggaggctgaggctgcagtgagccatgatcatgccactgtactccagcctggacaacagagcaagaccatgtctccccctccaaaaaaaataataaggaagaagaagaaaaagaagaaggaggaggaggaggaaggaggaggggggagggaggaaggaggagaagaaggaggagaaaagaagaagaaaagaaggagaagaaggaggagaaaagaaaaggaggaggagaaggaggaggaaagaagaaagaagaagaaggaggaggaggagaaggagaagaaggaggaagaggaggaggggtggggggaggaggaagagggaagcagaaggaagcaggaaaagtttgccagttttcccaggctggagctggtctgcagtttctgaacaaacagaaagcaaccatccagagtgcaggcaaagcacagacaatcagcgacctgtggcatgggtgtgcggaagaagcagagacgtctggggcactggttttccatattaatgcaggaaggtaattgtaaggccacaccaaagctgcaaggtcaccgagacaccagacattctgagaacatggctgtggcagagctctattggatgttctctccccaacacccaccatgcagcagccaggaacagcaggagagccccttcctctgtagcgtccttccagagcccccagttactctcacaaggatctcacattgtgctcactgtagagatgcttaaaggaattctgtccattatggcagagcatatgttaaagggtgaatttggagctgagagacaataattttttttaattttatgtatttctttatttttattttttggagacaagagttttacattgttacccaggctggagtgcaatggtgtgatctcagctcactgcaacctctgcttcccaggtccaagtgattctcctgcctcagcctcctgagtagctgggattacacgtgcccaccacccacctggctaacttttgtatttttagtagagatggggtttcaccatgttggccaggctggtctcaaactcctgacctcaagtgatccacccacctcaacctccaaaagtgctgggattacaggtgtgagccaccgcgccgggtctgagaggcagtaaattgacaacatcatctctaacaggacaagtactttaccatgatcctcatgtccctctgatctcccatccttgtcccctccattcatattgatgttgtccagaattttattttagagttatgaatattctctttatttcattagatcctagccttattagtatagcaataacaaggaacagttaccaaaataattaccaaaataaatcaccctttctttccattttttgtttttttgttgttactgttgttgacacggagtctcactctgtcacccaggctggagtgcagtggtgtgatctaggcccactgcaacctcagcctcccaggttcaagcgattctcatgcctcagcctcccaagtagctgggattacatgtgctcatcaccacgcccatctaatttttgtctttttagtagagacagggtttcaccatgttagccaagctggtctcgaactcctgacctcaagaaatcagcctgccttggcctcccaaagtgctgggattacaggcatgagtcaccgcgtctggcctcttcccatttttcttgcagcatctgtaggatttctctttctctctgtctctctctctctttttttttttttttggcccttcctccaaaactttttccaaatgggcctctatgtggcaatctttgtgaggcctcgtgagcttgaagttattttttttcaggttttaaaaataactttcattggctgggcacggtggctcatgcctgtaattccagcactttgggagggctgaggcaggtggatcacgaggtcaggagttcgagaccagcctggtcaacatggtgaaaccccgtctctactaaatatacaaaaaattagctggatgtggtgactggcgcctgtagtccgagctactcaggaggctgaggcaaaagaatcacttgaacccgggaggcggaggttgcagtgagccaagatcatgccactgtactccagcctgggcgacagatctagctagactttgtctcaaaataaataaataaataaataaaacttttatttttttaaagttaatgtgtgcattataggaaaccgaaaaacacaagaagcaaagaacaaaatcatccacaatggcaagcactttacagtttgacgtgtccttctaggccctatgtgtgtatagacacatttaattttatgggattgagatcattcagtgtgtatcatgctttttcacacatcatgaatatttatcaattcaaaatccccaagccatttgagtattttgataaccaagaatacactacaccagctcaatctgttagaaaaaatgtaatcctgtctttcttgggacaaaaatttcatagaagacaaaaatggcaacaagcctgtagatgaaagcattggcagagttcgattaaaatactgcattcccttaacgctcaatttaaatgaagttattttttgtaaagtcttcattgattgacaattcagttgtaaatttcttggttcacaattcttccccttcaatattttacttcctggtctgtttgcatccagggttgctacaaagaaatttgatgtcagtttgaaccttgttcctttgcagataatctgatctttctctctagaagcctctctctttcattccctctccttccctttctatatatctatatatccatgtatcagctttctcagcctatttgcatgcacgtgggccaaatatggctattccagcccaatattacacttcctcagttcaagcagccagcagggtttgaccagatgctctcagttttagttccaaattccttgaaaggagaagctgattggcttagcttggatctggtatacactctgggtctaattaaccatgaccaaaaggagggtcatggctgctaggctcactcctctgggggaagggacaaatcttatagaagagagaatggtgtggtattgatgattctgtcccttgttcagaggccagatttatacctggctcctgtgcttcctgtccagctactggtatgcagttgtactgagtgatggctcctctgaacatgggtttctgttccctggactcactaactctcacaactttcacttttactccacatcagccacccacaccctggaatgtattactcagaatgatttccctctgaaagtgtatgtatgtatgtatgtatttacttatttatttatttatttatttatttatttatttatttatttattgaggcaaggtctcactctgtcactcaggctggagtgcagtggcatgatcacagttcactgcagcctccaactcctgggctcaggtgatcctcccaccccagcctcctgagtagctgggaccacaaacatgtaccaccacgccaagctagttttgtattttttttttttttgtagagatgggttttgccatgttgcccaggctagtcttgaactcttggactcaagcaatccacctgcctcagcctcccaaagtgctgggattagaggtgtgaaccactgcacccaggcccctctgaaattttaaattcaagcttcccacttcaaaaaatttttttgaaacagtttgtttcccaggctggagtacggtggcacaatcactgctcactgcggcctggacctccgggctcaggcagtcttgcctcagcttcccaaatagctgggactacaggcacgtgccaccacgccccgctaatgtttgtatttttggtagagatggagctttgctgtggcccaagctgatactgaacgcctgggctcaagcaatctgcctgccccggcctcccaaagtgctgcaagcttgtggggaaaagcaagagagatcagattgttactgtgtctgtgtagaaagaagtagacataggagactccattttgttatgtactaagaaaaattcttctgccttgagattctgttaatctatgaccttacccccaaccccgtgctctctgaaacatgtgctgtgtcaactcagagttgaatggattaagggcggtgcaggatgtgctttgttaaacagatgcttgaaggcagcatgctccttaagagtcatcaccactccctaatctcaagtacccagggacacaaaaactgcggaaggccgcagggacctctgcctaggaaagccaggtattgtccaaggtttctccccatgtgatagtctgaaatatggcctcgtgggaagggaaagacctgaccatcccccagcccgacacccgtaaagggtctgtgctgaggaggattagtaaaagaggaaggaatgcctcttgcagttgagacaagaggaaggcatctgtctcctgcctgtccctgggcaatggaatgtctcggtataaaacccgattgtatgctccatctactgagatagggaaaaaccgccttagggctggaggtgggacctgcgggcagcaatactgctttgtaaagcactgagatgtttatgtgtatgcatatctaaaagcacagcacttaatcctttacattgtctatgatgccaagacctttgttcacgtgtttgtctgctgaccctctccccacaattgtcttgtgaccctgacacatccccctctttgagaaacacccacagatgatcaataaatactaagggaactcagaggctggcgggatcctccatatgctgaacgctggttccccgggtccccttatttctttctctatactttgtctctgtgtctttttcttttccaaatctctcgtcccaccttacgagaaacacccacaggtgtgtaggggcaacccacccctacacaagcttccaactttttgaccataaccacaagcgacccttctgtcacagcctcccaagtagatgagactacaggcacatgctaccacacctttctaactaaggtctctccttatccaagtctaaacttgttttgaattgacaacattcactgctcttgcactttgcaggcttcctacactcctggagaatattgtactccttggagatcattgccctacaaaaatcaagtttcttcttactcccttcacactcccagatagtaactttttacttcactctaaaaatagaatgtgggtcagatccagtggctcacacctgtaatcactagcactttgggtggctgaggcaggaggattgcttgaggccaggggtttgagaccagcctggtaaacatggcgagaccctgtctctataaaaatagaaaaacatagccgagcatggtggtgcacgcttgtagtcccagctactcgggaagctgacgtggaaggatcacaggagttcaaggctgtaatgagctatgatcacggcactgcactccagtctgggtgatagagcaagaccctgacaagaaacaaaagaaaagaaaagaaagaaggaaggaagggagggagggagggaaagggcgaagggagaagggaggaaggaaggaaggaaagaaggaaggaagcaaagagagagagacagaaagaaagaaagaaaaagaaaaaagaaagaaaaaggaaagaaaaagaaggagtggcttgggaaaaaatagaatgtattagttgggaacttgcttaacttgtgacaactaaaatgagtgattgaggcataagtctcaaatcatggaggtttattgagccatcttgagaatcagtaaacatgagtcacagaaacatctgtggctgtttggagaatctccaaagagcctacaaagaggttctcaggaggtttagtgtttatacgttttccttaaaggcggaggtgggggaggcccacagtaagacaaatgattacataattgtgagactttagttagtgcccagtaaatctaccttttacataagacaaggtgtacatttgaagaaaaagggaataggaagcatgtctcaggaaggggtgaaggaatcaaaaaggattactcttgtctttgttctgtaccaggtaagataagccagtagtcttttgaaagggctggtttagggccaggtgcggtggctcatgcctgtaatcccaaaaatttgggagggcaacgtgggcagatcacttgagcccaagagtccaagaccagcctgggcaacatggcaaaaccctgtctctactaaagatacaaagaaactagccaggaggctgaggtgggaagatcacctgagccagggaggtcaaggccacagtgatccatgattgtgccactgcccttcaacctgagcaacagagggagaccctgtctcaaaaaatggggggaagcagggagttctgtttagcccttagggaagaaaggctaatgactggtagcgaaggagggggtataacaaggcctctctgatctcccatcttattatggccatgaactcagcttccaaggtttctgtggggttcccttggccaagatggggtccattcagtccattggagactagaattttatttttatttctcatttgtcacagctacaaactttcctatcttttcttattcccccatgaaccctgaaaatttgggacaggtgtcaatttagaaagtttatgttgccaaggttgaggacacgcgcccgtgacacagcctcaggaagttctgacgacatgcgcccaaggtgttgaggcacagattggttttatacattttagggagatgaaacatcaattaatatatgtaagaagtacactggttctggctgggcgcggtggctcatgcctgtaatcccagcactttgggaggctaaggcgggtgtatcacctgaggtcaggagttcaagaccagcctggccaagatggtgaaaccccgtctctactaaaaatacaaaaattagccaggtgcggtggcgggcgtctgtaatctactcgggaggctaaggcaggagaatcgcttgaacctgggaggtggaggttgcagtgagccaagatggcaccacggcactccagcctgggtgacagagtgagactctgtctcaaaaaaaaaaaaaaaaaaagtacattggttccctccagaaagacgggaacaactcaagcagggaggggacttccaggtcacaggtaggtgagagacaaatggcattcttttgagtttctgatacgcctttttaaaggaggcaatcagaatatgcatctatctcagtaagcaaagggatgactttgaatagaatgggaggcaggtttgccctgaggagttcccagcttgaattttccctttagcttagtgattttgggggcccaagattttttcctttcacacccctcactacgctggaaaggtacatccctgtccccttgtctaaagctaattcttccacctggagtctggaccccattctctcttgctttatcagggacctggcttatcccagtattcccctgttcatcctacgccttcaagcttaccatctccatgatttggccacgtcagcatgacaaacatgacagagcaggagtatcaccaccttggccaagcactgtcgttttaagtttaccttgattaaaaactgcctaaatccaaagggcatcagcctaatggctaaggtcagcatgaccataaaccacaaataacatctccgaccagacacattccagactcctccctgaccagagacatgccagccccaagataacctccctgccagctggagagatgtcagccccaagataaccttccctccaactagagacattccaaccccaccataaacttctccccgacacagaaacattccaagctctctcaccaataaacacttagtctgtaatagagcacgctcctgactgaaatcagccagaagcccctctcaggtttattgctccaaaataaacctgtcttgactgttgagtgcttttcatgtttcttccctctctctttatttaactctttgtagagttaaggaaagtgctttaactttctttgcttaagtgcttaagtatctcctgttgacaaaaagagtcaaactctgtaaaatatttgcagagatttattctgagccagatacagtgaccatggccagtgttacagcctcaggaggtcctgacaacatgcacccaaggtgcccgggctgcagcttgattttatacattttagggagacataaggcatcaatcaatacatacaagatgtagattggtttgatttgggaagactggacaactggaagtggggtgtgtccaggtcataggtggattcaaaattttctaaatggcagttggttgactttatctaggctgggcatggtggctcacgcctgtaatcccagcactttggaaggccgaggtgggtgaatcacctgaggtcaggagttcgagaccagcctgaccagtatggtgaaacccagtctctactaaaaatacaaacattagctgggtgtggtggtaagcacctataaccccagctacttgggaggctgaggctagagaattgcttgaacctgggaggtggaggttgtagtgagccgagattgcaccactgcactccagcctgggtgatagagggagactctatctcaaaaaaaaaaaaaaaaaaaaaaaaaaaaaagacctggaatcaatagaaggagtgtctgggttaagataaggggttgtggagaccaaggttcttactatgcagatgaagtgtccaggtagcaggtttcagaggtaatagattatacatgtttattatgagacttagaaaggtgccagactcttagttaattctctcattctctcctggatcaggaaaaagacctgaaaagggaaggggattctctacaaatgttgattttccccacaagagtcagctttgcagggccatttcaaaatgtgtcaaagaaatatattttggaacaaaatacttccatttctttcagggcctcctatctgtcatgttggtatcttattgctacaaaaagtatgttttctcagtcttaaggtctctgtttcactgttcatgctggtcggctgtgcctgaattccaaagggaagaaggtataatgagacatgtccaaccacccattcccatcattgccggaactagtgtttcaggtttaccttagaatgcccttggccaagaggaggggtccattcagttgtttggggtgcttagagttttatttttggtttccactcccatattgaaatcttctcacctggccgggcatggtgcctcacacctataattccaacactttgggaggctgaggtgggcagatcacctgaggtcaggagtttgagactagtctgaccaacatggtaaaatcccgtctctactaaaaatacaaaaattagcctggcatggtggtgcatgcctgtaatcccagttacttggtaggctgaggcaggagaattgcttgaacctgggaggtggaggttgcagtgagccaagatcacaccactggactccagcctgggtgacagagtgagagtccatctcaaaaaaaaaaaaaaaaaaattctccccacctgaccttatgggctgctgctttctctcctcctcccacttcctggtcaatcgagtttaaattgtcttttcttcttaccatccatggtgagaaggtgtgttagtgaagcagccttgtagtctggagtaacacccaaggttccttgtctcacagccacaggaacaagaatgcagacacacaaagagtgaggttgagagtggaagtttactaagcgaaagaaagaaaatagctctctgctgcagagaggggtcctggaaaaatgggttgcccaatccatagtgaaacgcaggggttttataggtgatctggtgagaagatggtgtctgatttacatagggcatgaaaaactgattggatcaggtgtgccattggcataggcgtgaatcttcggtaaccccagcctgatcttttatcatgcaggtgggttctctgcctagactgtgctatgttgcccatttctttattgctgtacaggtggtaacaaaaaaagggaagatggagcctccatgttggacatgcctggccccatatagcccttttctgttggccctgctgctggcattcccccatgcaagcttctagcttccttatttatgtttgcagctcgatttttcaagctgctctttgtttagaaaagaaatgatttgggggctgctttttgttagaaaagaaattctgccgaggactcttttgccttcactacctccctaaataatttctttctacctccggtatcgttaggacttggggaatgtatctgagtcatggggcactcttccacccattacagtctagcttcaaccctcattactcactgaattggctttggtcaaggtcgtcacaatctccttgttgctaaatccagtgaagccccatcagtccttttctctgcagtagctgaccctactggccactctctccttgaagcactcctcttcctttggcttctctagtcctacactttctgattgttcttcagcctctctagcctttccctcaaagtctctgtcaatgctccgtgattatttttgtgtttctgctggtttggtttcctgagcacaggagaacttgcttagatgtgctagaaaatgtttccttttctccagacccgtttgatcgtcacatgccaatggtgttaaacttggagccgtctgctcccattcaaaggataataaaactggccaggcgcagtggctcacgtctgtaattccaacactttgggaggccgaggcaggtggatcattgggtcaggagattgagaccatcctggctaacacggtgaaaccccatctctactaaaaaaatacaaaaaaattagccaggtgcggtggcgggtgcctgtagtcccagctacttgggaggctgaggcaggagaatggcgtgaacctgggaggtggagcttgcagtgagccgattgtgctactgcactccagcctgggcgacagagcaaggataataaaacttatcttggctgagtgtggtagctcttgcctgtaatctcggcactttgggaggccaaggcagtcagactgcttgagtccaggagttcaagagcagactgggcaacatgctgaaaacccatctctacaaaaaaatgcaaaaattagccaggcatgatggtgcatgcctgtagtcccagctacttgggaggctgaagtaggtgtgttagcactttagggaatgtatctgagacacacagcaacaaaatatgttagtggtggtgaatccatagggtctgtagcaacctcaattcttgcctcctcagaagaattcgaccgaggggcataaggcagggtgagagactgaggcacattgtaaaggagaagtgaaaattaattaaaaagctttaaaggctgggtgcagtggctcacacctgtaatcccagcactttgggaggccaaggagggcagatcatgagatcaagagattgagaccagcctggccaacatggtgaaaccctgtctctactaaaaataaaaaaattagccgggcgtggtggcacgtgcctgtagtcccagctactcaggaggctgaggcagcagaatcacctgaactcgggaggcggaggttgcagtgagccgaaatcgtgccactgcactccagcctgggcaacagagtgagactccgtctcaaaaaaaaaaaaaaaaaaaaggctttagagctggaaagaaaggaaataaaatacacttggaggaggtccaagcaggtggagatcaggtgtgtggtttaaccctggacttgggattttatacggacttggaggtttatccattgatatgcttctggggggtggcattccttccctgattctttccttggggtgggctgtccacttgtggccagcacttgggagggggtgcatgcgcagtgtgtttaccgaagatgtacacatgcccacttgaagcattcttcccttactagtcaagtgttcttagaagaaggtcatataccagttaaacacagccattttgcctcttagtgcacatgcttgagcccacttgcccaagtcctaagatcttatagggaagctgctgatcagcagttccaggagttttctatctattgggatactgcctttccctggtgccgactgtgaccaattattattttagagagatttttggggcagggcacaggggacacggactagctacctactataacaggtggatcctttgagcccagggaggttgaggttgcagtgagctgtgagtgcaccactgaaatccagcctaggtgacagagtgagaccctgtctcaaaagacaacaacaacaggccgggcgtggtggctcacacctgtaatcccagcactttgggaggccgaagtgggtggatcacaaggtcaagagattgagaccatcctggtcaacatggtgaaaccccgtctctactaaaaatacaaaaattagccaggcgtggtggcacgtgcctgtagtcctagctactcgggaggctgaggcaggagaatcgcttcaactcaggaggtggaggtttcagtgagccgagatcatgccactgcactccagcctagcaacagagtgagactccctcttaaaaaacaacaacaacaaacaaacaaaaacttatttcagggagaaatgcttgcattccaaggtagggactctccgttctcttcctgagagaatttattcacattccaaagcacttgtttacactagggagatcagttttctctccctctctcaggagggctgtgaagcacgtgggcagcacgtagtctacataaactgtcaggtttacactttcagggtttgtcccctgtgaggcaagaaactctgttgtatggtcatggtccatctggctcctgccatgtcacctgtagggtactggacatgggaaactgatgcagttcttgctgtgtgtaataatattgtctgatttctgagctagaaaccccatgtttgttttttaacaggaaaaaatttaattgggaggtcattgggctgagacagatccagtgatttgggttcctacataagcaacctgaagcccaatgtaaacagtaaaacaaaactagagacttaaccagtcagaaactgctaactgtaaaccaaaaattaaaacctaagctcccccaccaaccaactgaaaggaactcctccaggccaaggagaccccagagaaacctgaaaacctgaattcctggccatgacaggaagggagattggacacgcctgatcctatgccctgcccccacttttttggagtttaggcacaattgaccagaattgaggttaaaatagagatcctaagactgaaaaatacagactttgtgacaataagatacaaaatttcaacctaactctgatatagcatcacatgacagccgaccctgaaggaaataaaaatattttaccccaaaatatatttcttttatatattttaaatggtcctggccaggtgcagtggctcacgcctgtaatcccaacactttgggaggccgaggcaggtggatcacctgaggtcaggagtttgagaccagtctggctaacatgtgaaacctggtctctactaaaaatacaaaaattagcggggcgtggtggtgtgtgcctgtaatcccagctacttggaggctgaggcaagagaatcacctgaacccaggaggtggaggttgtggtgagcccagacagcaccactgcactccagcctgggtgacagagcgagactcttgtctcaaaaaaaacaaaaaacaaacaaacaacccccctcccaaaaaaaaaaaaaatgattttcttcatagagttgacattctggtggggagagaagagcattaaataaatatatgtcaattgctaagtactacagagaaaaatagagccaagtaaggagaatggagaatgccagggggggaagggaaggcctctctgataaagcagtatttcagtagcgatctggaggaagtgaagagtgaaccatatgtttattttggggaagaacattccaggaaaaggaacagcaagtgccaaggccctgaggggggattgcacttgacatatttgagcatggttgctggagctgggtgagaggaaaagtgataagacatgtactcagagaggtgaggggaggggctcggctgcaaatcatgtcagccttttaggccattgtaaggactttggcctgtcctcttagtgaagagccactggaggattttgaacaaagggaatggcatgatccaaagtttgttttttatttttttaattttcattttttacaaacagggtctcagtctgttgcccagactggagtgcagtggtttaatcataggtcactgcagtgttgacctcctgggctcaagcgatcctcctatctcagcctcccaagtagctgggaccacaggcggtgccatcatacccaactaatctttttctttttttgtagagacagggtctcactatgttgcccaggctggtctcaaactcctggcctcaagcaatcttcccacctcagcctctcaaagtctgggattacagctgtgagcagggaaagtgctgggattacaggtgtgagccactgcgcccagcctgatgtttgttttcaaaggatccttctggttgttgcatggagaatagaatatgagaggtctagggcaggagcagtgagatgaatgagttcattataataatccaaataagagatggtagcttggccagtaaagccagataggacctcctgtggggtataagtgaaaggaaggaatcaagaatgatttcaagtggcttgagtaaatggaagaacataaattgccatttgttgagaatgggaagaactggaggagtaacagttgtggaaagatgaaattaggatgttactggacacagtggcccacgcatgtaatcctagaactttgggaggccaaggtgggatgatcacttgagtgcaagaatttgagaccagcctgagctacatagagagaccctgtctctaaaaaaatgtttaaagcttagccaggtgtgaaggcctgtgcctgtagtcccagctacttgggaggctgagacaggagaattgattgaacctgggaggcggaggtggcagtaagctgagattacgtcattgcatccagcctggacgacagagtgagactccctctcaaaaaaaaaaaaaaaagttactgttgtcaattttatgttttatatatttaccacaatttaaaatggcaatattatacaaggcaaataaaggttgtagaaatgttccagattaaaggacataaaatagacatgataactaaatgcaatcaatatctgactctagattggttctttgtttgcttagagatggggtctcattatgttgaccaggctggttttgaactcctggcctcaagcaatcctcttgtctcagtatcacaaagtgctaggattacaggcatgagccactgtgcccagcctaggtttgctcttacaatggaagggaaggaatgctttagactgggcatggtggctcacgcctgtaatcccagcactttgggaggccaaagtgggtggatcacctgaggtcaggagttcgagaccagcctggccaacatggtgaaaccccgtctctattaaaaatacaaaaattagctgggtgtggtggtgggcacctgtaatcccagctacttgggaggctgaggcaggaaaatcgcttgaacccgggaggcagaggttacagtgagttgagatcgcatcactgcactccagcctggacgacaagagcgaaactccatctcaaaaaaaaaaaagaatgatttaaaggacattattaggacaactgacagaatgggattatggatgtaaagtattgcaaatgtatgaagttgataactgtacaacaattatataagagaatatccctatccttaggaagtacatactgaagtgttctatgtaacttgccctcaaatattccagataaatattaaattgtttatgtgtatgtgtgtggagagacagaataagcaaatgaggtaatattttaacaataatctgaataaagggcatagagttttattgcattgttttattttttcgattttttgggaatttgaaataatttctaaataatgttctaaagttcaagctgggcatggtggcacacacctgtagccccagctactcaggaggctgaaatgggaggatcacctgagcagaggaggttgaggctgcagtgggccatgatcatgccactgcacttcagccagggagagagagagactctgtctcaaaataaaataagttcaaaaacaaacaaaaaccccagtgagcctgttccttttgttccattctctttttttcttttgagacggagtcttgctctgtcatcagactagagtgctgtggcatgatctccactcactgcaacctccaactccctggttcaagtgattctcctgcctcagcctcccaagtagctgggattgcaggcacgtaccaccatgcccagataatttttgtatttttagtacagatggggtttcaccatgttggccaggatagtctcgatctcctgacctcatgatccgcccgcctcggcctcccaaagtgctgggattacaggcatgagccaccacgcccggccccattctctcttaaacccactctaatcaaaccacctatcccacaactccactgaaatgcatttgtcaaggttaccaaatatacccatttgccaactccaatggtgacttctctcactctttctcttacttgacccatcagtatttgacatagtttatcactccctccttcttgaaatgtgtgcatcttttcacttctgaacaccacttttttggtttttctcttacattcctggccgctccttctaaatatccttgacagttccccttccaaacactggagtgcccagggctcagtcctcagagccaacctatctaggagtttctgtacaccctcagggtcatttcccaatctcaatctagtgtcttttttttttttttttttttttttttttttgagatggagtcttgctctgtcacccaggctggagtgcagtggcgtgatcttggctcactgcaagctccgcctcctgggttcacgccattctcgtgcctcagcctcccaagtagctgggactacaggcgcccgccacgacgcccggctaattttttgtattttttgtagagacggggtttcaccatgttagccaggatggtctcaatctcctgacctcatgatccacccgcctttgcctcccaaattgctgggattacaggtgtgagccactgtgcctggcctcaatctagtgtctttattcactcaccttagtctgtgcaaatcatattcttccagaaatgtaagatcctcctcccattgaggtcttactcaaggccaaactccctgtcacctaaatcctggttcaaagcagttggcggctgtacatggtaggaaaagtttctcatactatcctgagcacgcatgctgggagaaagatgggaggctggaagccccttctaatatgctggagagatctgaaatgcaattctcccttcaaaaatcagaaaactagggcccagtaaggccattacttgttgaaggtcattcagctgcttattggcaatgtctgagctaaagccctgtgctgtctccttaagtgttgatttcatgtatttgtgtcaggagcctccttaagaatctgataaaagctgcagactttttctcagcagaaaaaagcacttaacacatgccaacaacttttttttttcatttaatttgaagagtttcatggactctcaaagtacatctagacctcagattatagaaaccctgctctatcagaacaatccaaagcatggagaagtctacagcactactgatttagtaccctccacaaatcaatggtgtgaaaaagctggggacaggactgtaaatgttcaagattaaaagagtcttaggaagcataacaatcaaatgcagtatataggccttatttaattttttttctttttttttgagatggagtctcgctctgtcacccaggatggagtgcagtggcacaatctcggctcattacaacctccacctcccaggttcaagtgattttcctgcctcagcctcccaagtagctggaactacaggcacgtgccaccacgcctggctaatttttgtattttttctagagtcagggcttcaccatattggtcaggctgatcttgaactcctgacctcgtgatccacccacctccgcctcccaaagtgctgggattacaggtgtgagccaccactcccagactcaattttttgttttttagagacaaagtcttgctatcacttaggctggagtgcagtgacacaatcatagctcactatagccttgaactcctgggctcaagtaatcctcccaccacagccacctgagtagctgggactacaggcgcacaccaccacacatggctaattttttgtttgtttgtttgtttgttttgaggtggagtcttgctcattctatctcccaggctggagtgcagtggtgcactcttggctcactgcaacctctgcctctcaggttaaagagattctcctgcctcactttcccaagtagttgggattataggtatgcaccaccactcctggctgatttttgtattttttagtagagaggaggtttcactatgttggccaggctggtctcaaactcctgagctcaagtgatctgcccatctccacatcccaaagtgctggtattacaggcatgtgcctggctatataatatatatatattatatatattatataatatatataatatatatatataatatatataatatatataatatatatataatatatatatattatatatataatatatattatatatatattatatatatattatatatatatatatatatagagagagagagagagagagagagatagggtcacactcttatttgaattctgattcaaacaaactaagtataaaaggacatttagggagccacgcatggcggcatgcaccaatgatcccagctactctggaggctgaggtgggaggatcccttgagtccaggagttcaaggtcagcctgagaaatatagcaagaacccatctctaaaaaatgaaaaaaaaaaaaaaaaaaaaaaaaacattttggggaggggaacaaccacggaaatttgcatagactgagtattggatgatattaaggaattattttgttacatttgaaaatcattatatagaaaaatgttattttttagagctgaaatatcaaagtatttagggttgaaatatgatgtctaggatttactttaaaatacttcaacaaagaaaaaaatagatgaagcaattttggcaaaatgttaacaattaattataggcgatagggagctgggagttcattataatactcttctacttttgtgattgaaatttttcataaaaacacaaacaactgttctttgacattctggcaaagacaggaagatatctgggttgtcacagtcagtacccaaattctgagtgtccctgaagagtcattcatagactttctgactctaccaccacagactatctgctgggttttgtttctttttaccagaggactcactaatatcctgactctagactagctcctacaatgaaagagaaagatctactataaaggacattattaagtcaactgacaaaattggaatatggatggtagatttataaatgaatcagataggtattgttattctctttctggatctttcaaggaatttatccatttcatctgcgttgtcaaatgtatggacatagagttgttcatagcagtctcttatctttgtaaatatctgtaggatctgtagtgatggctcctctttcatgcctcatatttgtgatttgtgcactatcctttttttgacacagacaaacagaggccaaaaggagaaatgactcaggtcaagactgcagagccagctgggctatccttaactcctgctgccttgcctggctgtcaggtgaatcatcctttttgagtcttcctgctcccagcccacagctctcacatatcctttttttaatttttattttattattattatttttttgagatggagtctcgctctgtcgcccaggctggatggagtgcagtggcatgatcttggctcactgcaacctctgcctcctaggttcaagcaattctcctgcctcagcctcccaagtagctgagactataggcacatgccaccacacctggctattttttttttctgtattttagtagagatggagtttcaccatgttgctcaggctggtcttgaacccctgagcttaggcattccgcctgccttggcctcccaaagtgctaggattacaggcgtgagccaccatgcctggtcagctctcacctattctgcgtggcctgacgtgtagtctgccatggaagagcccaactgtagagcaaggacactcattgcccttggcctctgaggtgaatctaacttctcagaatgttctcttgccctctatcctctgcttcccctcaaaagaaaaaagaggtagaggaggtaagataataaaagagagattggggtggggagtggcaaatggtaaagatggactactttttagaagcagcagtaagcctcagcgtgcctggaaagaggcagttctgccgtggcagggagaggagatcagggaaaaacagtgacaactttactgcccccttttttttttttaagatgaagtctccgctctgtcacccaggctggagtgcagtggcatgatcttggctcaccgcaacctctgcctcctgggttcaagcaattcctctgcctcagcctcctgagtagctgggattacagacacaccaccatgcccaactaagttttttgtatttttgtaagagacaggttttcaccatgatggtcaggctggtcctgaactcctggcctcaagtgatccacttcaacgtcccaaagtgctgggattacaggcgtgagccaccacacccagcctactccttttgctttaactcttgtctccttaattgctagaaggaaggttcattaagtccctaagtaactgggggggcctaattgagcctacacctagttttccaaattcttattctatcaccctacccaaattccatgtctagatggtagtaaagggaatgaaagacatagggacatcagcttagctcctttttgtttgtttgtttgtttgtttgtttgagacagggccttgttcttgcccaggctggagtgcagtggcacaaccatggctcactgcagtttcaacctcccaggctcaagtgatcttcccacttcagcctcctgagtagctgagactacagcaggcacacatcactgcacctagctaattaaaaaacaggccgggcacagtggctcatgcctgtaatcctggcaccttgggaggctgaggcgggtagatcacaaagtcaggagttagagaccagcctgaccaacatggtgaaacccctgtctctactaaaaacacaaaaattagccgggcatggtggcacgcgcctgtaatcccagctactcaggaggctgaggcaggagaattgcttgaactgagagacggaggttgcagtgagccaagattgtgctcccctgcactccagcctgggtgacagagtgagactccaacccaaaaaaaaaaaaaatttgtagagatggggtttcaccatgttgcccaggctggtctcaaactcctgggctcaaacaatcctcccaccttggcctcccaaagtgctgcgattacaggcgtcagtcaccatgcctagcctaaacttttttttttttttgctttaacttcagatggcctcaccccttagtgccatccagtgatgaagtcaccaggtggaggtggtgctggctaaaactcgaagattattcctttactctgagaatctcctcaacatccaccattcctgctatctggaactcaagtcatcagcatacagaactacaatcagaaaaagagtcagccccactgtaggcccccaaatactaagggacaaaatgttgcatcttctgattctaaagcccattctctttccactatatcaataaccctcaaattcatgccaaatgtacattagtttttgtgtctggtactttccttcttagagtgcttggggaggatggtgggaaggaatgaagaggacaaggacagactcgtctgcctcaatacatccacatagtggacaccactgtcttttgggaagcttccccctctctcaggagtacgtgagtaagttgtttccctggctaccttcctggggaaccaaagtttgcggggaaagaacacatcaaagtgcttgttgcaaagaagaacctcctctttattccacatatagaagctgtgtttccagagctgggaaagggcttcgacctggccctacctctgtgtgggcctagagatgaaggtctagggccgggcgtggtggctcacacctgtaatcccagctacttgggaggctgaggcatgagatttgcttgaacccgggaggcggaggttgcggtgagctgagatcgtgtcattgcactccagcctgggcaataagagtgaaacaccgtctcaaaaaaaaaaaaaagagagagagagagatgaaggtctagatcctggtaattaggcctttctccagttggcaatgaaaagtcccagcctccagtcagtcccaaattagagagtgggagcaacggtgtgtgtcagtgccttggtgagatgaagatcagcttcaggcaggctcttccaggcaagttctaagatcccataccgggcaatgcccacgggaaggatggtgcgcacacagttctgccatgggaggggtaccgcaccctggaactcctgaggacttctaggagtatgagaactgccacaaaacaggcagcagaacagccgttccccgggaactagctctgtggcttttagggcctcttcgtagatgatctcttggggttgaggttcctctctcattagcagctcctgaagcagcttctggattctgggggacttaagttggtacaggtccatgagctggtagaactgttccatccaagcagtgctgtcttttggatatcgctgctgcagcatccgcaaaacatggtacagtgccacaaatgtctcccacaaaggcaactcttccttttttttagaaatgggctgtgtcttcttctctaacttgggcagtttaggaaacctgcgtttatccttaaaatcccagaagtccttttgaaacatcagtgccagggtttgtttttccacagaggcatgggcacttggaaaaatgtctctggtggcaggataaaagtattgcatttccatctccttgtgagcaatggatatctgctgtgccctctcacttctgtaaggttctcctagaagatgccaatttttagcccttgggtctggaatcctcttggtagctaatggggacttttgtgtggggacagccaaaggttttggccagctctccttttcctttgcttttataggaggaatcactttcaggtattttggactcatggactgtctacttgagatccttgtgtcttgtgactccagggcctgtctgtgacggtacacaatggcttcatgtttggccagatgcagccattctaagtttccctttgaggcaaggtctttgagcagctggcacagtctatggaaaccatccctggaaagctgttctcccgcttccattcgttctaggacatggcggatccactctacatctgagaggcttacgtctgcatgttgttccttagctgggatttgggagagaggtaactgtacctcagtctgtcccatcagaggtggatgctgcaaaaaccacttccaccaggcacctagtggtttgtgttggagttcctcagcttccacggtcctccttaatatgtgggacataaatggggtctttaagtcctgtgcttgggactccaaaactgtacccaaaacatgtggaggtatgggttcatattttcccatcacttctctttctttatccattgtccctaagaatttcctgggtatttcaactactgtggcctttttatcttcccaggatatttgtttctccggcactggcactggtgttttctctttcatctccagagctgttgacatcagtttcttcaaagggctttttagaactcctagtcttatagccctgcctttgccatgaggaactcctcttaaaatggaaaggactctttcccttcctcttaggctctttcttctttgttcttgtaacttaaattgtttttctttttttaagatctctttttccctgtccacctcttcttccaatgagcagctctcctcttcctcttcctcgtcactcaaactttctgtctcttcctcactcataatttcttctttctcctcaaacacttcttccttctcctgaacctcctccttcttcttttcctttttcttcttcttcttctcctcctcttctttctccacttgcttctcctccccttcctcctcctccttcctttcctcctcctcctccctttcctcctcctcctccctttcctcttcttcctccctttcctcctcctcctcagaagacaaactctcttgcttttctagttcatctaacaggctttccatttcttcagaaaaatgctcttcactttccacttcatccacttgactggaaaacttttcttttggtttgtcacctctcttggcctctttcctctttctccaccttcgtttaaggaatgggattacctcttcttcttctattcctccttcctcttcatcatccagtatgacttctgaatgctttctggccaatttgctctcttcctcagtcattttttcttctttgtttatcattcttctcattttgttggccagttttctctgcttccgagccagtttcttctcatctttagtcagttctgatcgtttttcagaaaaatcccactctttgatatccagcttactctgttctatactcaacctgcgctccttaacaaagagtgccctcttcatctttgtcatttttatttcttcctgtgttagtttcctttcatccctggttagtttttgaagtgcctttaagattttgttcagttttgctggttccttggaaaggctctccctttttttaatcaacttccttgaagccttggctaactttctttgcccctggacaaatattctctgtcctctagtaaattccagttttcctttggcaatttcgctttcctccatggccaatatcctgtcttcatgtagcagtatcttctcctctagtgacaattttctctcaaatagttcttgttcaacttgagtcattttcctttgtctagaagtttctggagtctctcccttagacagtgtttcttttccctcaaccagtctcatcttctcctcagccagtcttttcatttccaggttcaatgccttttcttccttagcaatatccaactctcctctgagccgtttctttccttggaccattgccttctccagagctaatttcattttttcctgggccaatttctcctgttttttggccaaactatcctctacttggaccaattttttctctgtttcagccagtttctccttcttcttgatcacagtctccttttcctgtgtcagcttctcctctacctgagccagtatcttgttgaacattcccaatttgttctttacttgcactaattgctttttgctgtgggtgagtctttctttattatagagtaggttctctttcctctgagccaatttttccttctcctgggccagattcttcttttcctgagccagattcttcttctggtacagtatcatcttgttctttgtgagttcttccatgctgttgatccatctttcccttttttgggccagtttcatcttcttctcaatcaattgctcccttttccgtcccagtctttcctcttcctcaggcattttttccttgtgctgggccagtttctccttttcctggatcagcaactcttcttcctgggccagttttgtctcttcttcagacagtttctccctttgccaggccaatgcctcctcttcctcagccagtttcttcttttcctcaaccagtttcccctcttcctgattcagttcctcttctttccaagacagttcttccatgtcccattccagttcctccaattcctgggccagctccttttcttgccagtccagattttgttccctctggggcagttcttccactttctgggccaatatgtttttcacctcagccagtttccctcctttctttgctagtttctcttcttctctagccactttctcccatttcttggccagtttcttccttttctgggccaatttctccgcctcctggcttagcttctcccctctttgggccagtgtttcctctttctgggcaaacttaccctctgcctgggccatttccctgtcatcctgggttattttcacgtatgcctgggccagttttctctcttcctgggccaactgtctctcttcttgtgcaagtttctcttcttcttgtgctaatttcctctcttcttgggctcgttttttttcagctcgggctcgtttcctgtgtattctggcccatttgtgttcttcttggatgtgtctctgctcttctgtgacctgctgttctttttcttccccctcccgagacacttcttcctccaaagtcacttcttcctcatccttgtactgttgctccttggacttagatgataacatattttcccagacttgtttccactcctcccatttcagcttcttgtcctcctgaagcatttcctcctccggggatagcttctctccagcctgatgtagtttctcctcttcctgaagaagcctcttctcccattcttccttccatgccttccaggatttccttgtctcaccatggacctgtttccactcatcccaggcctttttccagtcctgccaagatggtgtcctctcaatcataaccagttttccttcttgtttgaccactttctcctctagtgtggccatttcctccacttcctcactcatatccctctcttctttggtcatttccctctttatttttcctacttttctttccttctggacagctttcctcccttgcttaggtgacttctgaaaggttttcttctcttctttctttgatatttcttttcccatggttacattacctggttctaaaaaaataactttcttgccctttttcaaaatcacttgggtttcctccaagcccagcatgtctcttgctttcttttgtgcttgttcttcttcccttggcatcacttccttgtgtctgatcacctcttgggtcacaccttgtatcatgtcctctctaattgctccttcctggataaaaattggtttcttctctggcgggactacatcccaatcaaggtcctcaagcagaaccttactttctttcttcaatagggggcagatctcctgaaagagttcccagctggggtgcctatctaccagcatctcctgagcaaatgtcactagctcagcgtttaggttttctgacatttttgtttgggaaccagatatcctcagggccataagacgacatagatcgtccctccatgatgagccatctccagcggttgacctgcggccagatattccagaggctccccgcccttggattttaacctttttagtaactggctgttccattacaggaggtgtagtttcctcatttataactttggcttcttttcccttctttttgtgcttctttttgagtttctgagctgttgctttcttgtctcttttgtcacgtattttctgcagcctcttcagggtcaatgcaatgtgatccttcgagatatctttctcttgagaatcaacatcttttgagagctttattacactggtgcttgaagaccattgggaatagacggatgcttcctccatctcaattggtgcggcctcagtcccactttcatcctctaagaggcctggctctgtgctcatctgtttagagtctctctctttcgtcttcttgagaccccgcaaccatttttggcctgcagtaaaaatcgagagatggaggtaagcaaagtatgggaagcgacatgaaacccttcccaatattaggtgtgagctaagaagaactgtcatataagaagtaacaacagagagaactgaggccttaaaaaaaaaaagcattctctttgctttattcctagccccctactcctgccaaatcctagagagctaggccttagagtcttcctgagtttgagtggatccttccttagaaagtctttttttttcattgctttcataaaaatcaattttactgaggtataatttaaacaggatatacccattttaagcaaacagtttgatgagtttgaaaaatgtatacacttttgtaattactgcaatcacaatcaggatataaggcatttctattatccccctaaattccctcctatatagtgtcccagtcaacatctatctacccttaacctctggccctaggcaaccactgatctgctttctgtgactgtagattcatttgccttttttaggattccaaataaatagaatcattaaaaaatgtgctcttttgtgtttgctttctttcaatagtttttgagattcttccatgttgttgcatgtatcactcttttttatcacagtagtatttcagtttatgaatacactataatttccttatctatacatttttttaaaaaattatactttaagttctgggatacatgtgcaaaacgtgcaggtttgttacataggtatacaggtgccatggtggtttgctgcacccatcaacccagcatcatctacattaggtatttctcctaatgctagccctcccttagtccctcacccgagagtgtcttttctatgatgagatctttccacttatctctcttcccacctggtatctctctttttttttttttttgagatggagtttcgctctgtcacccaggctggagtgcagtggcaccatctctgctcattgcaacctccacctcctgggttcaagtgattctcccacctcagcctcccaaatagctgggattacaggcacccaccatcatgcctggctaatttttgtatttttagtagagacggggtttcaccatgttggccgggctggtctcgagctcctgacctcaagtgatctgcccacctcagcgtcccagtgctggaattacaggcatgagccatcatgtcccgccagcccacctagtatctcttgatccactttaaccctaactaccctgcctcttggggaccctgaggcacagaccagattaccccttacatactatgctttttgacccctgcttggcctcgtctttggcctttgctgggcttgatggccacttcagattcttcagaaactgtaggaggtttcagggaggatttaagttcagaaggcattgagacatctaaagaaaaagccggcttttcatctctatgtgacagggtcaggttttcattcaatctctgctccacttgagtggaaaggatttggagatctgtggcccgcatccccagtagatggtccaggggttcctccccgatcatctgctgcctatgaaagtcaaaggagaagaaggactatgctgagtcaggaacaaaagggagaatgggaagcaaaaaacggttgtggaacaggcaggaggcttggcaaagtggccaagagagatggcatatgcagaggaaaataatggctgagacaaaagaaactatctaggaagccaaggtggcaatgaatggagtgatctgtattggaggctgtagaagcaggagaaaaggatgaaaatggaacttgaagaagtagcggacacataggaaaagcaatggagaaaggagtgagcaggccaggtatggtggctcatgcctgtactcctagcactttgggaagccaaggtggcaggaagatttcttgagcccaggagttcgagaccagcctgggcaatatagtgagactctgtctctacaaacaattagccagtgtggtggtgcatgcttgtagccccagctactcagaaggctacggcaggaggattgcttgagcctgggaagcagaggttgtagtgagccaagatcgcgccactacactccagcctgggcaacagagtaagaccctgtctcaaaaaaagaaggaagaggaggaggaagaggagtgaacagtcgggattgtcaaggatagtcatctaggcgtgagcaaaggctatgagaaagaagaaacatcagggagaattaatgaacagggatgaagaaatagcaaaggaaaggagggggaaaatggcgaatggggtgaagaattgaaggaagcacaaacttactgcatctcccgaaaagtctcttgtttttgggtcagctgtaagagtgaggtcctagagtggattccaatctcagccatgaggcttagggtcttgatcctcactctttcatccttgtccattaatccttgagccagaggcatggcaaaaagatgagtaatcattcctagacgcttcagcccttcccaagctagttctcggatcagcgggttggaattggttgtatcattcagtagccgacgggctgtctcagagcgtagggctggggacacctggtaagaggcaaagatttgccctagtgcaccaacacagcactggtacttcagcaaggaagcatggaccataatattgagcattgtctcaatcatgctattaatggttatttcactcatctttcttcccagccaacttcggtttgctccatctgtaaggacactgtaggttacatccttggaaagtctcatttctaggaagtgttcatcctcctccttattctttggatattctgtattacttatagctcttaccctgctgtgccagaaaaagaattcttgagacctgtcccattccagctcccgctggggtgcatgcaggttgcactgtaggtatattggggtgccctctggccaaagacgggcacgaatcactgaattggggatatagcagtcaggggcaaaaagccattcccgcccatgaccaaagtagtatcgcaatatctgataggggttgagtccatcccagctagtcagttgtagctggggaggaagcacataatggcattggtaacgtttgctcacctgcatccaatcttccatgtcctgcaaagaataatgcatggaggaacgcagtaacactgggctcccttcctcatcttcttctatcacatgtggcacagaatggtcaaaggcaatggcccggttgttgacaagtttctccagacccactaatttctgttgcgcttgtccagggtagatgtacttgggcacaaacatggtctcaaaggagaagaagaagcttggtatgaaaggcttagggacttccagtacttcatctgatatgctcataaaggaaaggcgagtcagcagggctgggggaagcaattttaaacaggacactaggtaaagactctggttaaaagtcacaagcaggtcaccccggtcatttgcaaaacagactgggccaaagtgcagtgatgagtccagaatgcctatgagtctgccatggaagtcccagatccgaacagagccatcggcagaacctgtgacaaaaagactcaaggagaggcagacatcaaaggatgtgatggcacacaggtgcagaggcagtgtttctatgaatttcaagccattctgtgacccagaggacagaaaatcatggaacttccagagacgcaggcagtttgtctctgtgatggcacccacagacttgggcaagagtatcagatgtgttaggtgacagctgctgagaatgctggcgagaggccgcagttgtactttgaccccatcaagcacagcttctgacaggtgcacatagtcatccattccataggaacagagcagagagtttccttggccaccaaaaatccctccagacagcgtggagagtgccagtacagcgccaaagtgcatgaatttttctaatcgagcacagctgtgctgggagagcactcttatcacaccactctggtgcccagagaatatcagtccctctagaccccgccccaagttgaaatgcccataagccaggcattgtacaaagtcctgagaatttggtgaggtgcctaagagatacttggctgggcaagggcagcgggttgtgtcaaataccagaacctctgagctgcctgttgctacaaagagctcctctttacctgggtcgtaggcccaatccacagcctggtccaggattgagaagggccaggtgataaccagaaggtcccctgttactggggacacaaagcgcaacaagccatcctcagtggtacacaggatccggaaccagttatttccacagcagacccgacgcaactgctggggagcagagccacagacattgaagaggctgtagaagcagggcaggcggtgcaaggaaaaactatgggcagtttggcagaagaaagtaatgctgtcaataaactggagccggtatagctcctcaccaagctctagccgccgaagcaggctccctgaagtcaggttccactccttgattaggctgtcactaccagctgttagcagggtgtgggcctctggtcggctgcggatacagatcactcctgattgatgggcctggaaactgtggagtggatggccctgctggaggctccaaacttggatttccccagcttggtttccagcatagagaaagccctgatcaaaacaggtgaagcagcaggtgatggaggagccgctgctggtggacgtgaacctctttacctctcccagctggcccttgccctggtgcataaggaccctcaccaccgtctcacacagggccaggagggagccactgggaccattcagcacgatgtcctggacaagctcatcacctggcatggagaccatgtgggctatttggaggcccgtgccacctagctcaatgacccaggtcaccactgcccccaggatgccagacagaagcatcttcatttccgggtcatagcagaggcagctgatgttgaagcggcagggcactttacccaggggtttgaatgcccgaaagtggtccccaaagagtcgcaggatcaggtcaccacagtagaccacgaggatatgaaaggagcctgcatggaccatggactggatgggtggcaatcgttcagtcatggagaatgttcttttctcaaccatgtcctcagttttgctcttcatccatgctacagcctagaagagaataagaaggaaactgcctaggccgggtgaggtggttcatgcctgtaatcccagcactttgggaggccgaggcgggtggatcacctgaggtcaggagttcgagagcagcctggccaacatggtgaaaccccatctctactaaaaatacaaaaattagctgggtgtggtgtcggtgcctgtaatcccagctactcgagaggctgaggcaggagaatcgcttgaatttgggaggcaaaggctgcagtgagccaagattgcgccactgcactccagcctgcgtgacagagcgagactctgtctcaaaaaaaaaaaaaaaaaaaaaagatgaaactgcctagagctgatggtagggcagaatattcccttatttccccatgttttatgttaaggaggaattggaggactcaagtgattttatcccttggtgatgggaattggaaatacggtagaggcaggaatcctaggacccttttcctaaccttggtttacttcgggggaaccatacaacctactcaacatggggactataattggagaaaggatgaggagagatttctggttccagaccacattcatccatggggaatatcctcctttgtcaatctgggctaacagttatatgggcatggctcttggagaatgggccaagaagggtaagaaaggcagtcttacttgtatttcttttgtgtttgatgtcacccaagagagggaggcgaagaagtgggcatcactgaagtaatagcatacacacggcatattttgaggatagcgagactctttgaacagtacctgggaccggtcactcagcacaatcaggcagttctttgggtcttccgaaggttgctggagagaggcgtggcataaactaagaggccagggcacagaggcactaaatatattctcgcacaagtcacagttggagcagttcccaaagtcatgcttcccacccgaaggacctactcctgttacactcacacgtgcataacttatcacctgtggcacagctatacttcacaagcatgtaacaaatcccccaatgcatgagggaacacaaccctgcagagtctctgtgtgcaaatttcatagtgtgaacacagggaaaaatgatgttcttttcaacatgaagttagccatgcctgccctctaacattcttttttttgttttgttttttagatggagtctctttctgttgcccaggctggaatgcagtagcgtgatctcagctcactgcaacctctacctcccaggttcaagcgattctcctgcttcagcctctcaagtagctgggactacaggcacatgccaccaggccctgctaattttttgtatttttagtggagatggagtttcaccatgttggccacgctggtcttgaactccagacctcaggtaatccgcccgcctcggcctcccaaagtgctgggattacaggcatgagctactgagtccagccccctctaacattctcgcttgtgtgtagaaggtacatgtaccataaaagacacaatatttaacagaatagtcaggcaagtacatcaccttacgcacacatggaatatagcggaatctcccaaagtcagtgcagctctaagttactgaagcttaaagctgcactaagtgagactcttgggacaccctatctggcctttaaatttgacagaggacaagcatttatacaatatatatattatcccatggtgatagaccatgtgctatgaaacatgcatctgggatcctgttttttttttttttttttttgagacaagatctcactctgtggccccatgctgcagtgcagtggcctgatttcggctcattgcaacctttgcctcctgggttccaagtgattctcctgcctcagcctcccgagtagctgaaactacaggcacgggctaccacacccggctaatactttgtatttttagtagagacgggatttcaccatgttgcccagtgtggtcttgaactcccgagctcaggtgatctgcctacctcgccctggcaaagtgctgacattacaggcataagccaccacgcctggccctgggatccttgtatgcagagccaaccatagcaaaactgagcttggcaactgttttctctggtgcctcctcccctgttttaaaaaatctctcagccaggcacagtggctcatgcctgtgatcccagcactttgggaggccgaggtgggcagattacttgagctcaggagttcacgaccagcttgggcaacatggtgaaaccccatctctactaaaaatacaaaaaattagctgggcgtggtggcgtgcgcctgtagtttcagctacttgggaggcagctgaggcaggagaattgcttgaacctgggaggctgaggttgcagtgggccgagatcatgccactgcactccagcctgggcgacagaacgagactgtgtctcaaaataaataaaataaaataatagaaaaactctctttccagaaggtcagttcctcttacaatcctccagagtgtccactttccactatcaaaatgtccttgcgagaagtctgtgactcatggaaattgatggcctacctcctgctaaggtggtgactatagtataccctgtttgcttcctgttctcaaggacaatctgtggctcttctgaaatgctcatgactgtaagacaggtagcagccaacctataatatgtttatgtcctacatatacattaccttgcttttatttatggtgtcatttaggaggagttttaaatctttccacaggggaatgagcctgggggaagacatcaccgtcagactcccttggccctcctgaggactgttgcttaaaaacctgtgggaatccaaaagagcccagcttagtcactgccattttccgagaagctaggaatcagaaagcaacaacaatgaactcatgtttattgaacaccttctgaaagtcaggaactgtgcacaagacataccttctcatttcatccactctacagcccagtaaggtaggcattatctcattttatagatgagaaaactgaggcttggagagagcaaattgggagtgaatcttagcgtgttcctgtcgtaacccagtaacatatatgggtgagagaaccagagaaaccgagagaggggctgggaaagaataccctcacaggcaaataatagtccttcacattttgtggtgtgtccggagagcattttgtgaagactgtgggttctcaaagtatggtccctggacctcatgaaccaggacagacacttaacgactgtaagtgacagacacttacgactgctgtttgtaggctggcctagttctcagacaggtgaccactctatttccttccaactcatacttcatgcttttcagctgctctggaaacatgacagttaaatttatagtctggccagcagagggcaacggaggccaacctttcctgccagatgtagaagaacttcatccgtttagagaaatggtgggaagttgttaaaaatgcaaattattgggccccaccccagacctactcaattggaaattctgagattaaggcccatcaatgaataattgttgttgctgcccatcaatctgagattaaggcccatcaatctgagattaaggcccatcaatgagttgttgttgtgttgttttgttttgttttgttttgttttgtttttaagagatagggttttggctgggcaccgtggctcacgcctgcaatcccagccctttgggaggcggaggaggatagatcacctgaggtcaagagttcgagactagcctggctaatatggtgaaaccccgtctctactaaaaatacaaaaattagctgggcgttgtggcacgcccctgtaatcccagctactctggaggctgaggcaggagaatcacttgaacccaggaggcagaggctgcagtaaaccgagattataccactacactccagcctgggaaagagtgagactcagtctcaaaaaaaaaaaaaaaaaaaaggaaaaaaaaagaaaaaaaagagacaaggctttgctctgtttcccaggctgtagtgcagtggtaccatcatagctcactgcagctttgaactccagagctcaagtgatcctcccacttcagcctcccacatgctaggactacaggcatatgccaccacacctggctaatttttgtttctttgttttgtttttgtagagacagggtctcactatgttgcccaggctggccttgagctcctggtcacaagtgatcctcctaccttggcctccccaaatgctgggatttcgggcatgagccaccacacctggcctattttgtttttttgtttcaatttttgtagagatgggagtgggggtggggtagggatgagggggtgtcactatgctgtccaggctggtctctaactcctggcctcaagctttggcttcccaaagacttggcttcccaaagtgctggcattacaggcatgaaccgttgcaccttgcttcaacaataaccaaaatgtgaaaaacactggtttagagaactgttggagtcccaattcatttggcctgggcttcctgaagcaaggtcagcaaaacacaccttctggtatgccacagagacttgctcactggatttgggatgggggaaagcagcaggcaaaacttaccatcatcatctcacatgcatacagtgggtgagagcccacagaaaagctttcaacatcaatcatttcattagttcttgaaagaatcctgagaggcagatatcatcatctccattgtacaaaagaggaacattaactcaaagaggaaaagggatgtgtttgagtctacaaagggcagatcaagactaagatccaccaggtgcagtggctcatgcctgtaatcccagcactttaagaggccgaggtgggtggatcacgaggtcaggagttcaagaaccagcctggccaacatggtgaaaccctgtctctactaaaaatacaaaaattagccgggcacggtgatgggcgcctgtaactccagctactcgggaggctgaggcaggagaatcgcttcaacatgggagacagaggttgcagcaagccgagatcacgccactgcactctagcctcagtgacagagcaagactccgtctcaaaaaaaaaaaaaaaaaaagacccaatccacagttcaggattcttctactatatcagaggaggaagaggttttgctggctgatgctcagaaggctctccgatccacaaatccactcacaatgggaacttgggactggctggcagcacacaccatcctgtctctttccacgctccccagactgcatgctgccctcctgcgatagctgtctccattctgttccactcaaccctgcacttgctgctcattctgaatgcctttcaggctctagttgatctgcttcagatcctgcacagcagtggaggcccctgtgggagttaccccaggccaaagtgggaggctcactcgctttcagccagaagttcaaggccagcctgggcaacatagtgggaccctgtctctacaaaaaaaaaaaaaaaaaaaaaaaaaaattagccaggcgtggtggcatgtgcctgtggtcctagctatttgggaggctgagatgggaggatcacttgagctcaggaggttgaggctgcagtcagctatgatggccccactgcatgccagcctgggtgacagagcaaaatcctgtcttaaaaaaaaaaaaggccaggtgcggtggctcacgcctgtaatcccagcactttgggaggctgaggtgggtggatcatgaggtcaggagttcaaaaccagcttggccaacatggtaaaaccctgtctctactaaaaatacaaaaattagccaggcatggtggcgggcgcctgtaatcccagctactcaggagcctgaggcagagaattgctttgaacccaggaggcggaagttgcagtgagccgagattgcagcactgcattccagcctgggtgatagggcgagactccatctcaaaaacaaaacaaaacaacaccaaaaaacccaaacaacaaccacaactcagagttaccccactggccccttcttgtggccctggagctgctgagagagtagtcgtttgtaacaaatttgcagtcactgccatcacttcccatattccaaatagctccactgggtcccacttctcttgaccggcctacagagagcaaatggttgggactatttgggggaatatttctaggtgatgagtgagaaggaggactttcaaaccccaaatctctatgtttatttaattttatgtggtttttttttttgagacagggtctcgctctgttgcccgggctggagtgcagtagtagagtcacagttcactgcagcctcaaacccctgggctcaagcaatcctcctgcctcagcctaccgagtaactgggaccacaggcacacacccccatgcctggctaattttttaaaaactttttgtagatacagggtctccctatgttgcttaggtggtctcgaactcctgggctcaagcgatccacctgcctcagcctcccaaagtgctgggattacaggtatgagacactgcacctggccctctatgtttatttatttatttatttatttatttatttatttgccactctttcccacaccatagaccagtttccttgggttagcctcagaggatgacatttgactccctaatcccagtacctgtccttaaaagcaagtttgtagtgagctccagatgctttaatcccaacagtcttgtttaatatcttttatttctttttccttttttattttttttgagacagagtctcactctgtcacccaggctggagtgccgtggcactatcttggctcactgcaacccctgcctctggagttcaagtgattctcctgcctcagcctcctgagtagctgggattacaggcatgcaccaccatgcccagctaattttgtatttttttttagtagagatggggttttaccatgttggccaggctggtctcgaacttctgacctcaggtcatctgcccgcctcagcctcccaaagtgctgggattacaggcgtgagccaccatgcccggctgattgtttaatatcttaacacaaagataatctaatgggagaattcaagctctgtggccaatttagcgtgaagggtatttgggaccaacgcatgttattcctgctgactgtggagacaaaccaggtccatgactgggtgttgacactggaactatattccttttcttagcaccagtccactgtaaggtacagcattagttggtggcctgaggaaaggcaaacctcccacgagctttgccttgttaaagagagttgactctagggggcgctgcactccacgacacggtcaggcccctgggctccctttggctcacttgttggctccaatgtgctctgttacaggtgagtgtgaggggatccaggcaggtttcttgctccctagagcttatagtcatcaaagaagagatataaaatggattacagtgggaaattctaggtgatgggttatattatcctttagaacttttctgcaacttttaatttcctcaaattaaattgcaaattaaattcagttttaagaaggaaaagtatgaagtgctttgagtacatataacgaggagacctggccacccaaaaggaaggtgatgagtgcgccacactgtgagacagggccctgcatggattatataaccttgcaggtggtctcacatttgggcacaggggtgcagaaagtccagctgatatcagaagggcctaattagttgactgtaaagtcagaggggcaacctaggcttacttggttctttgaatgacattactgataaggagcccaagtttgtccccagggcctgggagtgctactctggccttcaggtggctgcatagctagggctgggggtggaatgcatttaactttcttaatgggaataaatagttttccaggctgacaaacatacattaacagggtgggctagtttctgttggatggaagagttaccctggatccctgagaagtaacgacagtatccaggattaattaggttgtaaagtagtaaccaggagttttacatatcttttaattcttatttattttgagacagggcctcactctcacccaggctggagtgcagtggcatgatcatggctcactgcagcctcaaccactccggctcaagtgatccttctgccttagcctcctgagtagttgggactacaggctagtgctaccacacctggctaatttttgtactttttgtagagatggggtttcaccatgttgcccaggctggtctcaaactcctggcctcaaagaatccacttgcctcagcctcccaaagtgttgggattactacaggtgtcagccaccacacccagccaatttggtttaattcttacaattattctaacgacttagctattatcctccctgtaattaaacaaccttttttgttttttgttttgttttgttttgagtcggagtctcactctgtcgcccaggctagagtgcagtggcgccatctccgctcactacaagctccgcctcccaggttcacgccgttttcctgcctcagcctcccgagtagctacaggcgcccgccaccatgcctggctaattttttgtatttttaatagagacggggtttcaccatgttagcctcgatggtctcaatctcgtgacctcgtgatccacccgcctcggcctcccaaagtggtgggattacaggcatgagccactgcgcccggccattaaacaacttttaaaaacggacatggtaaaatattgaaaatgtactaaggagcaggtaagggaaaaaaagtcaccttttcacacctgaccagctgtccttctgtttccccttcccagaagtaactctggttgtgtctttcttttgtgtgtgtgtgtgctttttttttttttttgagatggagtctctgtctgtcgcccaggctggagtgcagtggcgcgatcttggctcactgcaacttctgcctcctgagttcaagtgattcttgagcctcagcctccctagtagctgggattacaggcgtgcgccaccacacccagcgaattttttgtatttttagcagagatgtggtttcgccattttggccaggctggtctcaaactcctgacctcaagtgatccgcccacctcccaaagtgctgggattacaggcgtgagccactgtgcctggccaaaaatatttttcttatgcaagtgatagtatactatatacactgttattcacttttctcttaatatacctttaagactaattcatattaatacatataactcatttcccaacagttactagctgcagggtattccaccgtgtggctgaactatcatttatttattcaaatttctattaatggacattcggtagtttccaaccttttgctactgcagctaatgccgcaaatgagtatctttgttagtgcctcataacattttaattttatttgattttaattaacttaaattgtagaactgaggccaggcatggtggctcacgcctgtaatcccagcattttgggaggccgaggctggcagatcacgtcaggagatcgagaccatcctggctaacatggtgaaacccagtctctactaaaaatacaaaaattagctgggtgtgatggcgcctgcctgtaatcccagctacttgggaggctgaggcaggagagtcacttgaaccagggagtcagaggttgcagggagccgaggtggcgccactgcactccagcctggcgacagagtgggactccgtctccaaaaaaaaaaaaaaaaaaagtagaactgaagcaatgaaaacatttttccattaacctaacttggaataatattttggatatatttgggttaaataaaatattaaaattaatttcatagctgggtgagatggctcacgcctataatcccagcactttgcgaggctgaggtaggaacatgtcttgaggccaggagttcaataccagcctgggcaacatagcaagaaaaaaaaaagtaaataataatgataaataaaatgaattttacctgtttatgtcaaaattaaaattgcatatgtggcttgcattacacataaaaacacacacatatataattttttttttttttaaagagacagggttctgctttgtcgcccaagctggagggcagtggtgcaatcatggttcactgcagtctcaaactcctgggcttaagcgatactcagcctcttaaatagctgggactatggccacatgccaccacgcctagctagttttttagttttagtagagatagggtcttgctatgttacccggccagtctccaactcctggccttaagtgatcctcctgcctcggtggctcaaagtgcagggtatatttctcttagctagtattgctctacattgttgtagtctggtggtggcctgatatccctactggactgaaaactccctgaaggtaggagtccagtctgtctggatttctcttgtgtctccataatcacccaacctgacatggaataggtggttaatccatttttgttgaatgagtggaaaaatgtgctctcccaggaagaaacatatgcttcccagcttcaagtgttagtgaacatcttcctagaaggcaggctgaggcggaaagggtattgactccggcttctccaccagaggaccttgcaattccagtcaattccctcggtaactcttatggaggagtggcaatataccttaaaaaaggagtgtgtgttgcggggtattccgctgcttggttatgtcaccaggtggattaaatttggacaaaatttcccaaggtgtaggtactctacaaacactagttaccctcaggaatgtgcgatcaacaaaagaatgcaagataacaaggcccctaggcagcccctgggtcttgtggctcccgtcgaaggcagagctctggagccgcctacgccggggacaggcgactacacctggggcccctcaccctcgggcctcctgcacgtggcagggaaggcagggcgtctctatctcaaagcattggctgcgcctgttacctgcgacaggattcccgacaagggacgggtacggcgtgtgcactcaggagctcctagagctaggggcagcaactaagaagctacctggcggatgttgcgagaggactccgcccacagaacggttggcccccaaccccgcagccggcggacttcccgaggccaggggtctgaacgcgcgtgcgcatgggcgcgcgcccggcgcgagaacgcgcgcgcgctctcgaaagaaaaaaaaaaaaaatcctctccgcggggtcccgcggcaatttaggccggggtctgccgacgaccgcgcgtgcgcgggcgtgcatctacgccctcctccaccgccccctccgctgggggtctagcgcactgctccgcttcccccgtttcccccgggctagcgtcctaggggtaagtgactcgagcctggcagagagtgagggagaggttccgccgaatgaagggaggaggtagacggggccaggagaaaggagaaaccgccccggcggggcgaagagcgcggctctcgagctgtagtctgcaggagacacacctccctccctcacgcccctcggggctgcggaagtgctctacagactggagctgcacgaaggcgaccagcggactaccgttcctaggaggcagcgcggcggtgcgcctacggctcccggcagcccccgcgcgccattctctttttgagttcgcggccggctagggcgaaactacagttcccaggaggactcgcgcgaagcggcttggaagtgggcagcctggaagtcactcgggccaccggagctggcggcgtctccagcgagcggcgcggagctggacgccgcgatcgtggggcccgcgaggcgggcagccggggcgtccaggtacgtggctccgggtgcaggatcggcctcgcgcaagggtggcggggaatcggtggctgcccggaccccgagggtcagcgcgggcggacggccgggtgtgggtactggccgtggggggcggcggcgccgggactcgcgccctccggacccagccggactcgtgcccgcatggctcaactttccaggcgtgcaccccggcgctgtggtgaagagcttggaggcggggagcggtggattcgcgtcccggctgtgccactcgggagccgcgatctgggaaaaccgcgccgaacctcaatttcccctgcagtaaaacggagtaggagagcatcttggcggagactctgttgagataatataataaaacatttggcacataggaggcacttactacgtatttgggttattgttagctctccgaaaaatgaggtgaagatgttatcgattgcatagggtgaggattagttgagcgtgtgcatgtaaagaggtgagtccttagttagcacccaatgcaggctagctgctgttaaccgagattattttgttaagagcgttggtttggaaggcagagagaccccaggttcaaatttgaacatttaccagctgtgtgactttgggcaactggcttcacctctctgtgccttggtttccctatctataaaatggggatttaaatagcaaccacttcgtcgagttgttttcaggatgcagtgagaataccatgtgtaaagtgcttagcacagcagctggcatataacgctcagtaaatggtaccatttattcagcgttttcctagtggcccagagaccctctgagggtggggctctggccgtagtattggtcacccccgagggccagattcagaactggtccagttgacttcccttcctactacctcaggttcctcatttacaaaatgggataataacaagatcactctcaaagggttgtaaggatttgctgagattgtatttctagtccagcgccatctctcactaagtagcagctcttatgtattataattgttcttcaatattctccatctggcccagagactgcctgactgtgggctgtgacatgacagccctgagctcccccacacatttgctcccatcctcagtgtcccatctgtggaatggtagtcataggacttttgtgccaggattgtttggatggttccaggagataattcatgtttagtgctttgcacaaggcccggcacacagtaagtgcttattaaatgattaaatgtatcttgctgtttttttttttaataggccctttttgcttctgtttgtacctacatggcagagtgagcacaaagttagtgtttttttatcttccccctccctcccaaattttacttaccaaagattaaattatggaacacactatagtagaaaggcctaagaagaaatgggtctgacctgccatcagcagtcccctgctcacacacccctccccacagagccagtatgttcactccagtgctttaattattgtcctggtgctgccagcttttgcctttgtgtcccaaagccactgagtcccctgcactccagctccagatgtggagcctgtgcttctttgatgctgtggctcaaagaagtggctgtttcttgggcaccataaactcagcatgtccaacctgaactccttctcctcctggaaccagtagtcaccatcttggcaaatgtgccagcattgacctggttgcctaagccagaaacctgggagttgctcttcttccccagccttcccatatccagtcaactagcaagaaggacgaagctgccatttcatagaaacaccatttcattggcccatattggtctcccatctgatgggcactgaaagttcccctcagcttgagacggagtcttgctccatagcccaggctggagtgcagtggcacaatctcagctcactgaagcctccgtctcccgggttcaagcaattctcctgcctcagcctcctgagtagctgggattacaggtgcccgccaccacacgtggttagtttttttttttttagtagagatggggttttcaccatgttggccaggctggtcttgaactcctgacctcaggtgatctacccattttggcctcccaaagtgctgggattgtagggcatgaaccaccgcgcctggctgtgacaaggttaagtcaagtcattagggattaacatacgtaaacctatgtaacatatgtattaataagggcaagaagatgttatagacttggctagacagcagtggctgtggatgtggcatgaaagcctggctttcaggggacccagttctgtgattttagcctggtaaagatcggctgagttgttaatttctttcagaaaagttagatggtgtcagcggcttagaatatcccgtgtgggagggtggccatcctgggcatttcaggaggcagcacacataccacacacccaagaagaggctgggaagggaatttattagcgctccccttaggttgagtttattgtcagaaacctgtcattgtgatttcatttgatgatagaaaccggtggcctcaatcacatttgtgatggccaacaaatttacctaagcattttgctaacctgaagaagtaaagcagtggcttaaaaaaaaaaaaaaaaaagcagcacgtggctttttagcagtcagtgtagaatgaatgatctaagagttaaatgtgagtctgtgtttcagacattgcagttgttaggtggtaaatcaaaagtggaatttagaatgtgcagtgattggtgcctcatttttttgctgtaaaatatattttactgatatatttcaaacatagtcttagtaacttgtaaaatgtaaattaaatgtatttacattttaataaaagaattcaataatcatttcctttaaaataaagtgtttgtttttagctattagaatgagaggctatttggcagggtgcagtggctcatgcctgtaatcccagcactttggaggctgaggtgggtggatcacttgagcccaggagtttgagagcagcctgggcaacatggcgaaaccccatctctacaaaaaattagtcaggtgtggtggcacacatctctagtcccagctacccgggatgttgaggctgtagtgagctgtgattgcagcattgcactccagcctgtgtgacagagtgagaccctgtctcagaaaaaaaaaaaaaaaaagaatgagaggctgttgtaccagtttgtgcatttgtgtattcttcaagactgatattgcttcctttttgttgtttttagacagagtcttgctctgtggcccaggctggagtgcagtggcacgatctcagctcactgcaacttccacctcctaggttcaagcgattctcctgcctcagcctcctgagtatctgggattacaggcatatgccaccatgcctggctaatttttgtatttttagtagagatggggtttcgccatgttggcctcgaactcttgacctcaggtgatccacccaccttggcctcccaaagtgttgagattacaggcgtgagccaccgtgcctggcctattgcttcctttttttaaggactattttggtcatgaccttttgtgcgtgtgtgtatgtatgtgattgggttgaatttagcttaaaaaaagttatgcaagaaattcatgcttgttgtaacgtgtcaaacaatacagaggtgtagggaaaatacctagtgccaccctccactccaaaaccccatgtcgccagagataaccatttattcagacagtgagtatctattaagtatctattgctaggctttggagatagcataatgaacaaaatggatgtgctctctgcccttgtgatttggacagatgcttcagttatctttttctgtgtttatattgattatgtttgtatgtatgtgcgtgtgtgtgtgtgtgtgtgtatcgactgttttcttcctcctcccataccattccccaaaaaaggagggggtagggatcaagctacacctatttgtaacccagttttttcaattaatggctgggcatgtccttccaagtcattacatatagatctggcttatccttttcaacagctgtacccacattcttcagtgcagagagaccacgctttattccagcattcccccactgctggtcctttaggttgttcctctgagatgtcttttttttttttttgagacggagtcttgctctatcgcccaggctggagtgcagtggcgcaatctcagctcactgcaagctccgcctcctgggttcacgccgttctcctctgcctcagcctctccgagtagctgggactacaggcgcccgccaccacgcccggctaattttttgtatttttagtagagatggggtttcaccgtggtctcgatctcctgacctcgtgatccgcccacctcagcctcccaaagtgctgggattacaagcgtgagccaccgcgcctggcccctctgagatttctttacctcagcaaacacacatctaataagtatccttggtggtggctcaggagatcgagaccatcctggctaacacagtgaaaccccgtctctactaaaaaatacaaaaaaattagccaggcgtggtggccggtgcctgtagtcccagctgctcaggaggctgaggcaggagaatggcgtgaacctgggaggcagagcttgcagtgagccaagattgtgccactgcactccagcctgggcgacagagcgagactccatctataaaaaaaagaaaaaattagcagggtgtgatgatgagagcctgtaatcccagctacttgggaggctgaggcaggagaattgcttgaaccagggaggtggagggtgcagtgagccgagattgtaccactgcactctagcctgagtgacaagagtgacactctgtctcaaaaaaaaaaaagtataaaaagtatcctttcacataggcagcatggcccagtggctgaagcacaaactctggggccacatggtctgggttcacactgtgactctatcctatattagttgtgataccttgggcaaatcatgtgtccttctgagccttagtgtcctgatctgaaaatggggatgataccagtgtcttccttatagggtggttgttgagaggtttcataagattatctatgtcaagccttcagggcagggccagctgtgatcttttttttagagacagggtcactctgttgcccacgctggagtgcagtggcgtcatcatagctcactgtaaccttgaactcctgggctcaagtgatcctcccacctcagactccctagtagctggggctacaggtgtgcaccaccacacccagctaatttttaaatttttgtagagatagggtctcacactatgttgcctagactggtctcgaagtcctggcctcaaatgatcctcccgcctcagcctacatgtgttctttcaaacccagagaaattcacaggaagagccaactcaatcacttgaaacaccaggtagaaataagaaaaagttatattgcagggatcccgcttggagatgttgggggcctaaggtgagggatccagctgccgctgaaagaagggaggagatttgcccaggaagacaggagccagtaaagtgccctgaccacagtgggtggtgggggtgaggggctggtggtggagcatcagtgggaaatatcactcctcatatttgcgagaagtgtgccatggttggaaggtggcttaggtggcgggcagaccaagttcaaatcacagtatagccactaacttgtaagatgtgcactgagcttttttcttcattggcaaaatgggtatgatagtagtctttacctcgggggtcgctggagactgaatgaaatgtctgcaagactttcagcacattaggctgtcattagccctgtgcagttagctactattcttattttattgagttgacagatgtgttgagaccctgctgtgagccagggtcctatcctaggcactgaggattcagcagtcaacaagacagacaagatccttgctgtcctagggtttacattctagccattctagcccgggaagacacacaataaacaggatcatttcactttgtgtttttgagatggagtctcgctgtcacccaggctggcacaatctcagctcactgcaaccactgcctcccaagttcaagcccatctcctgcctcaggctcctgagtaactgggattacaggcatgcgccactatgccctgctgatttttgtatttttagtagaggaggggttttgccatgttagccaggctggtcttgaactcctgacctcaggtgatctgcctaccttggccttgtacagtgctgggattacaggcgtgagccactgtgcccagccttttctttcttttttttttttttaattaaaaaaaatcctggctgggcacagcggctcacgcctgtgatcacagcactttgggaggctgaggcgggcagatcacgaggtcaggagatcgagaccatcctggctaacaaggtgaaaccccgtctctactaaaaatacaaaaattagccaggtgtggtgacaggcgcctgtagtcccagttactcgggaggctgaggcaggagaatcacgtgaacctaggaggcaggaggaggcggagtttacagtgagcctagattgcaccactgcactccagcctgggcggcagagtgagaggccgtctcaaaaaaaaaaaaaaaaaaaaaatcctgatcctgcctcttcagatagttttaactgtgatggagaaaatttaacagggtaagtggagagcaaatggctgatggggcaagatggcggtggttaccttagctttgatggtcagggaaggcctcccaggcctctttgaggagtcatgtgaactgataccttaatgagcagtggcactggctatgccgaaagttgaagaaagaacattccaggtagagggaacagcaagtgttaaggcccggaggtgggagtgagtttgctacaaagagtatcagtttgactggagaagagttaattcctagttttcaagttgatactactttaattttttttttttttgtggcagggtctgctctgtcgcccaggctggagtgcagtggcatgatctcagctcattgcaacctctgcttcctgggctcaagtgatcctcctgcctcagcctcccaaggagctgggattacaggaatgtgccaccacacctggctaatttttttttggtacttttaatagaggagacaggttacaccatgttggccagggtggtctcaaacgcctgacctcaggtgatctgcctgcttcagcctcccaaagtgctgggattacaggtgtgagccactgcagccggccacattttttctattttttgtagagacctgttttgcccaggctgatcttgaacttctgggctcaggtgatcctccaccctcagtcttccaaagtgctaagattacaggcacgagccaccatacctggcctacttttttataaaataataataatgatagcagcttacctggtgcttactctgtgctagatgcttttctaagcatttcacacattcctcagttaatcctgacagtagtccagtgaagtaattaacttgatcaaactcattttacagatgaggaaactgattccaccctccatgctcttcacctgcattctaaactcttccagggccctccttaccaggcagaggcaaattgaggaagtggacacagcatttcctttccttgttgtttgacatgcaaagcactttagactatatttagtacctaattgatgtggcagcaggggccgcctgggatgttgtggcatcatttttgctctcaatgagacacgatagggatggtttggtggtggtttcaaaactaaagaccctccagcagagcctgtcaagtaaaacaaggttgactgcttggttgccataccaggcacaggttagcatgaaacaaagtgtagtgtccaaggagagggagcagggtgtctcctttgggtgagctttgcaaggggacttgggacttggctggaaaaggtgtttttttttgtttgtttgtttttgttttttttgagtcagaggctcgctctgttgcccacgctggagtgcagtggtgtgatctgggctcactgcaacctccgcttcctgggttcaagcgattctcctgcctcagcctcctgagtacctggagttacaggcgcccaccgccactcccagctaatttttgtatttttagtagagatggggtttcaccatcttggccaggctggtctccaactcctcacctcaagtgatccgacggcctcagcctcccaaagtgttgagattacagatgtgagccatgcacccagctggaaatggtgttttaagcacactagccatgtgggctgttaaagtatcatactatagcccatcaactaagacaatgattcttggacctgtaagggccccaggtccctgctccggcatcatgacctgtgtgcactttgatttgctgtagcgtgggcgtattttgaatgaagggtagccctggttagatgtgaggacagtagtgggtgcttttaagactaaaaatattgggtgggcatggtggctcaggcttgtaatcccagcactttgggaggccgaggtgggaggattacttcagaccagaagttcaagaccagtctgggcaacatagaccccaactctgcaaaaaaaaaaaaagtttttgtttttgagacagttctcactctgttgcccaggctggagtatagtggtatgatcacagctcactgcaacctctgcctcctgggttcaaatgactgtcctgccttagcctccacagtagctgggattacaggcgcccaccaccacacccggctaatttttatatttttagtagagatggggttttaccatgttggccaggctggtctcaaactcctgacctcaggtggtcttcccgcctcagcctcccaaagtgctgggattacagacgtgagccaccgcatctgacctcatctctgcaaaaaatttttaaattagccaggcttggtgatgtgcacctataatcccagctactcaggaggctgaggtgagaggatcacttgagcccaggcactaccacaccttgagcccaggagatcaaggatacagtgagctatgatcacaccactctgtgtctaaaaaaaaaaaaaaaaaaaaaagactgaaagtatggagagcatctttcatctgtccatctgtgaaacatttcttcacctaccctgtgtgtcagggtccatgcttgacactgacagtataaagttgaataagacactggttctcaaaagcccacaacagtgctgtctgttagaaatataacgtggggccgagcgcggtgactcatgcctgtaatcccagcactttgggaggctgacgcgggtggatcacttgagttcaggagttcgagaccagcctagccaacatggtgaaatcccatctctacttaaaatacaaaaattagctgagtctggtggcatgtgcctgtaatcccaactactcgggagacggaggcagagaatcacttgaaccctggaggtgacagttgcagtgagccaagattgcaccactgcactccagcctgggcaacagagtgagactccttctcaaaaaaaaaaaaatgtgggtcactgatgaggctcatataggtaattaaaaattttctagtagccatattttgaaaagtaaaaggaagcaggaaagtaattttaatgatatattttatttcatctaaaacatcatttcaacatgtaatcaatatagaaattattagtgagctattttacttccttttttccacattaagcgtttgacatacaatatgtattttacactttcagcgtatctcagttggtaccagccatgtttcaagtgctcggtggctacatgtggctaatggctaccacatcggacagcactggccgagggtatgagattcacgtgtaaatcaaaggtggtagttcagtgatagatctgacatgccactcctgttttatcttggcggagaagggcagatgtatgatgaaaagcaggtttatcacaagcagttatagctaaccaaagagctactgtccatcaaacttgctgtatgtgcctggcactgtgcttagtgttggtgggtgttgcctgtgttcggaggtgccagggactacagttattcccatttcacagatgaggaagctgagataaggcaatgagaggtcacttgctcaaagttgggaagtggcagaggcagcatttgagctcaggtgcagagtgtatacttttaaacctgttttatatgctgtattggagggtgtttaagggggatagggtctgagttttgagcaatgaaaaccataggagggacttgttgcacaaaatcgattctgaggccggtcgtagaagatcatacctgtaatcctaacattttgggaggcccaggcaggaggattgcttaagcccaggagtttgagaccagcctggacaacaaagcaagactccacctctacaaaaatttaaaaaattagctgggtatggtggcttgtgcctgtggtcccagctacatgggtggctgaggtgggaggattgctttaggccaggaggtcaaggctgcagtgagccgtgattgtgccactgcactccagcctgggtgacggagaaagaccctgtctcaaaaaaaaaagaagtcccagtttgtcagcattaatctctgggtttacattggtgtcggtgtgctggtttgagacctgaatgattgagaggtccactccttaaattgacctctaggtttgctggaacctggaaccttacctcccaggaaagagaggggtctttggggagttgggaggagggtgagcagggggactaaggaaggcaaggaaaggtcttggcgtgtttgaaagctcatttctttgttttttgtttgtttgattgtttgtttgtttttgagacagggtcttgctctgtcaccaggctggagtgcagtggcgcgatcttggctcactacaacctccacctcctgtgttcaagtgactctcctgcctcagcctcccgattagctgggactacaggtgcgcgccaccacacctagctaatttttgtatttttagtagagatggggtttcaccatgttggccaggatggtctcaatctcttgaccttgtgatccgcctgcctcggcctcccaaagtgctgggattataggcatgagccagcatgcccagcctgaaagctcatttctaaattgctgctttggggccaggcctggtggcttatgcctgtaatcccagcactttgggaggatgaggagggcggatcacctgaggtcaggagttcaagaccagactggtcaacatggtgaaatcccatctctactaaaaatagaaaaaattagccaggcatggtggtgggcacctgtaatcccagctacttgggaggctgaggcaggagaatcaaacgaacccaggaggcagaggttgcagtgagccaagatcacaccactgcactccagcctgggcggcagagcgagactcggtctcaaaataaataaataaataaataaataaataaataaataaataaataaacaaactgctgctttggacatgaaacctgttgtgtcgctgactctggccctcattgctgtgtattctggtgggtgctgtgggctctggtggaagcaacagcagagcttagcttgtgaatgtgtcttacccttgctgtgctccaaagacattgccagtggatggggtgtggggaagggacatcacagtggtttcctctgtcaactctatgagagtcgtggttctagactttttggaggtgtcaggtgcaggttgaatcctggccttctacctaaacagggcaggtgctggagattctcagcttgttcctgtccccagatggtgctcaccacacttatctccaactgctggacagtgcctggcatgtgagagatgctcagtaagtatctgttgaattaatgatacgagccagcattcactgagctcttactatgtaggaggcactgttctgactgcttctcagctaatatcttattgaatccttagaaccactccttggggtaggtactgttgttattaccatgtctcgtaagaggaaactgagttacagagaagttcaagtcacagagctggtgagtctcaaattcaggattcctatgcaagtcactggctccagagtctaggctcttaaacactcactgtgtggtctttcgatgaacagacagacgaacagatggggcagacaagcaggaccattctcacttgttccggcctcctcactccacacgtggtctccccctgttttgggggagccccacaacagatcccaggcccctttgggccctgaggcttttttttttttttttttttttgagacagagtttcactcttgttgcccaggctggagtgcagtggcgcgatctcagctcaccgcaacctctgcctcccgggttcaagcaattctcctgcctcagcctcccaagtagctgggattataggcatgcgccaccatgcctggctaattttgtatttttagtagagatggggattctccatgttggtcaggctggtctcgaactcccgaccttaggtgatctgcccaccttggcctcccaaagtgctgggattacaggcatgagcgactgtgcctggctgggccctgaggctttaatacccctctggccagtgcttcttggtttgtaatttttttttttttttttttgagatagggtctcactctatcacccaggctggagtacagtggcatgatcatagctccctgcagcctctacctcctgggctcaagcgatcccccatctcagccttctgaatagttgggactacaggtatgcacaaccatgcccagctaatttttaatttttttgtagagatgggatctctctatgttgcccaggccggtcttgaactcttggactcaagcgatcttccctttttcctcccaaagtgttgagattacaggcatgagcccaccatgcccaacctaaaaagtccttatctataagatgctcatgctgaaatatctatgattaaactgttaagatatctcggatttccttcaaaataatatagacaggcagagagtgcaggggctcaagtgtgcatgggtgaataagagatgaaataagattgtctgtgagtggaactattgaagccagacaatgagggcttattatactctttttttgccttgatgttttgaaatgtatcatcatgagaagttaaaaacaagtacaacaaatttcacccagcatttgtgtatttcaagctcaagtgtacatacaggggaattccctgcctctgctcagtccacttatataatacaaatgtttgcttttttcttttttttgtctctattatatgagccaatacttggcccaaggctttggaagcccctttgataaagccgtgtctggcagcagtgggaacacccggccaggccccagcagccctggcttctctgagcagcgaacaccgtggcactggccttcgagtcagtttactgaggtcccttttccctgagatctgtttccctctagcacctgcctgtggggcccctcccacattttttccaaggacttgtttcaacaaaaagcctcagaccctcccctcaggacagacgtacacagatcttctgacacccggccttcctctggtgggtctttgttgaggccccacacgaaccggaatccagtctttggtgtgcccacagcaccgcggcaggaggcaggaaacgtgcccctttccagttctgactctggacaaaagaagaaaaagggcaagatgcagcttgtgacagtgcctgggacctgatggtatttctaatcaagctagcagctacaacgcctttacggccggccggcgtgcgctccccgctcccatcactgcatttgtgctttgggggtctggaacaacagcacatgagtatgtggtaaaattcttatgcggaagtggcaggaaaagagggaaacgtttgggggcttctcctgatggtgtgctgcctggtgggtagagatggttgatgggaacaggagtgctggttggtcagatcctgccagtgctggcgccgtttgttgcatctgatggtgagctctttcctctggtgccccgtttttctatgctgtgctgttggtttgcagggaggaagacagggaagtcctgcaccccctcaagcttccataaacttccacccccagcaccatcttcatctctgtcctttctttttctttctttttttttttttttgagacaaggtcttgctctttcacccagcctggagtgcagtggcacgatcacaactcaccgcaacctcgaactcctgggctcaagtgatcctcccacctcagcctcccaagtagctgggaccacaggcatacgccaccacgcctggataattttttttttatttttgtggaaacaggttcttgctatgttgtcgtggctggtctcgaactcctggcctcaagtaatcctcttgcctcagcctcccaaagtgctgggatcaaaggcgtgagccaccatgcctggcctgtttttctttccaaggcaccttttgcagttcttttagtagagaggctttcaggtgagtctagtgtggagggaatgtcatgagctctgtcttcagtataggtggcttgatttgtgtgtatttcccagtgtggactgcacgttggatctgagggcagcaaaccccaaatgctgatggcgtgtctgattttttttattttttgagattgagtttcgctgtttcacccaggccggagtgaactggtacaatctcagctcactgcaacctcggccccaccgggttcaagcaattctcctgcctcagcctccctactagctgtgattataattgcctgccaccacacccagctaatttttgtgtttttttagtacagacggggtttcgccatgttaacaaggctggtcttgaactcctgatctcaggtgatccacccacctcagccttccaaagtgctaggattacaggtgtgagtcactgagccctgccttgatttttattttattttattttgagacagagtcttgctctgtcgcccaggctagagtgcagtggtgcgatcttggctaactgcaatctccatctcccgggttccagcgattctcctgcctcagcctcccgagtagctgggactacaggtacccgccaccgcacccggctaattttttgtgtttgtagtagagacggggtttcactgtgttagccaggatggtctcgatctcctgacctcttgatcagcctgcctcggcctcccagagtgctgggattacaggcgtgagccactgagcccggccttgatttttaaacttatcaagtcctcagtgaggggagcactgttctagataccagggtgcagccatgaggaaaacagacaagggttctcacccttctggggctcaccttcaagtggaagagtcaatcaacaaacaagataaagaagtaaaacacggctgggcacggtggctcatgcctgtaatcccagcactttgggaggccaaggcaggaggatcatgaggtcaggagatcgagaccatcctggctaatacggtgaaaccctgtctctactaaaaatacaaaaaaaaaaaaaaattagctgggcgtggtggcgggcgcctgtagtcccacctactcgggaggctgagacaggagaatggcgtgaacccgggaggtggagcttacagtgagccgagatcgcgccactgcactccagcctgggcgacagagcgagactccatctcaaaaaaaaaaaaaagaagtacaacacgcaccgtgtcagttggtgataagtgcgagggagcagaaattaaacaggcaaagggcctaggaagcagtcacgcatggcttcacagtggggctgtgttctgagaaatgtgttgttaggctcttttgttgtgtgaacctcatggagtgtacttgctgcgaagctagatggcacagcctcctccacacctaggcgctatggagtaggctattgcttctaggccacaaacctacacacatgtgactgccctgaattctgtgggcagttgtaacacaatggcaagtatttgtgtatctaaacatagaaaaggtacagtaaaaatatgatataaaagattttttaaaaggtgcacctgtacagggcacttaccgtggatggagcttgcaggactggaagttgctccaggtgagtcagtgagtgagtggtgagtggatgggaaagctaggacagtactgtacaccactgtagacttaacagacacggtacatttaggctacactaaatttattttaaaaaatgtttcctcaataatacattaaccgtagcttactgcaacttgtttactttgtaaacttctaaatttcttaactgtttgggttttttttttttcttttttttgagacagagtctcgttctgttacccaggctggagtgcagtggcacgatcttagctcactgcaacctctgcctctcgggttcaagcgattcttctgcctcagtctccccagtagctgggattacagacaccttccaactgtaatctagtttgtttgttgttgttgtttttgtatttttagtagagacagggtttcaccatgttggccaggctggtctcgaactcctaccctctggtgatctgcctccctcggcctcccaagtgctgggattataggcatgagccgctgcacctggccttgactctttggtaataccacttagcttaaaacacaccttattcagttgtacaaaaatattttctttatatctttattctgtaagctttttttctatttttaaatttaaaatgttccgtttttatttttttgctttctgagctgcttttagtaaaaactaagacacaaacacatgagcctaggcctccacaggatcattagtatcactcttcctcctccacatcttgtcccactggaaggtcttcgggggcagtaacacacgtggagctgtcacttcctatgataacagtgccttcttctggaatatctcctgaaggacctgcctgaggctgttttacagctttttttttttttttgtatataagtagaaggagcacactctaaaataacaataaaaagtatatatacagactggccaacatggcgaaaccccatctctactaaaaatacaaaagttagctgggcatagtggcaggcgtctgtaatcccagccgctcgggaggctgaggcaggagaatagcttgaatccgggaggcagaggttgcagtgagctgagattgcgccactgcactccagcctgggtgacagggctagactctatctcaaaaaaaaaaaaaaaagtatatatactaaatatgtaaaccagtaacatagtcatttattatccttatcaagtgttatgtactgtacatgggctgggtgtggtggctcacgcctgtaatcccagcactttcggagcctgaagtgggcggatcacctgagatcaggagttctagaccagcctggcccacatagtgaaaccctctctctactaaaaatacaaaaattagctgggcgacgtggcgtgcacctgtaatctgagctactcaggaggctgaggtaggagaattgcttgaatccaggaggcagaggttgcagtgagccgagatcacaccactgcactccagcctggggaatagagggagactctgtctcaaaaaaaaaaaaaaaagattatgtactgtacatgattgtatgtgttacattgtcttttacgtgactggaagcacagtaggtttatttacaccaacaccacgacaaacaggtgaataatgcatggctctccgacctccccgtggctcatgtcactaggcaataggaatttttcagctccatggtcgtcttgtgggaccacccttgtaaatgtggtccattgttgactgaaacagtgttatgcaacacatgactgcgttaaggtggagggtgttgaaattttgggaagggtggccagggatggcctccttgggaaagtggccagacctgaaggaggtgagggagtgggaacagccagtgcaaaggccctgaggtgaggggcctggtaagattgaggcccacatggctggagcggaatgagcccaggagagtgggagggatgagggtagagaggagatatttgcagatctcttagggtcctgcacaggtttgtcttttctctgattgagaaggttaagatttttcagggttgattgatttattacttttttttttttttttttttttgagacggagtctcactctgttgccaggctggagtgcaatggcccaatcttggctcgctgcaagctccgcctcccaggttcaagcgattctcctgcctcagcctcctgagtagctgggactacaggcacgcaccaccatgcccagctaatttttgtatttttagtagagatggggtttcaccatgatggccaggatggtctcaaactcttgacctcgtgatccaccctccttggcctcccaaagtgctgggattacaggcgtgagccattgcgcccggccgatttattacacttttgaaaagtttgactagtgaccacatgtacaaggaaccaaagcaacaaaaatagggcacccagttcccttcccaagagaccaccacaattccagtttcctgatggtgaccagttccttgacactacattatctgagtgagtttcctgtcttgtattaggttggactgcctgacattgtgctttcgtgggtcaagaatggttgaatattggcaattttatgaggttcagcctaacagcttcctttcaggaacatgaggaatttggccaatcctttcttgctgtgagggttggtagtcctcccccgattcctcctgcatctcaccatcctctttcagtgacaggcccaacagtgcctgtaacaccagggcgtgaaaacccctgccctacttgtggcctcaaaccagggcttgctattaagcccagcaagaggctgccccttttccacggggacctcacctggcttctgatgttcgtcactttggctttctgcgtcttggtgccaccagttttgaaatcacagctcccagagggaggggcacccgcggactcttgctgggtgtttggtgtgactcacatggtgggggtgctctctggaacccgtgggcattctgcatcagtcacccatcagagtagctggcagagcacccagcttgaggtgtctgtgggaatctctgcggggaccaggtggctcaggcttggggagggggcctgaggagccgtgcacctccctgtagcgatgggagacttgcaagtcgttgtggaaccagggcactggcctcggtcctgtgggagcgggtgggggtgaaataaccttaaaggagatatggcgccaactttggaagagctcagtcgggaagttgtgtcagttggtaagcctttggctgcaaacagtagtaacagcatcagcagcaacaactgcagcagcaagtaggcaatgtatgtagcgtctgctgcatgcaagacactgtgccgggcccttcacatgaagccactcctttaagcctcccgacaaccctggaagatattattctccctttgcagatgaggtaactaaatttgaataacttgttcaaggtcaggcagctaaaaaaaggtggtggcatgatttttttttttttagattcagagggtacatgtgaaggtttgttacatgagtatattgtgtgatgctgaggtttggggtacagatcctgtcactcaaatagtgaacagagtacccaataggtagattttcttttccttttttttttttttttgagatggagtctcgctctgtcacccagggtggagtgtagtggcgcaatttcagctcagtgcaacctccgcctcccgggtttaagcaattctccctacctcagcctcccgagtagctgggattacaggtgcctccaccaaccatgcccggctaaacttttttgtattttttagtagagattggattttgccttgttggacaggctggtcttgaactcctgacctcaggtgatccacccaccttggtctcccaaagtgctgggattacaggcgtgagccactgcgcctagcccccagtaggtagattttcaacccttgccccattccttcttggtttttggaattctcagtgtctgttgttcgtgtgtgtgtgtgtgtgtgtgtgtgtgtgtgtgtgtgtgtacgtacccaatgtttagctcccacttagaagtaagaacatggggtgtgtgtgtatatgcaatgtttagctcccacttagaataagaacatggggtgtgtgtgtgtgtgtgtgtgtgtgtgtgtgtgtgtgtatgcaatgtttagctctcacttgtaagaacatggggtgtgtgtgtgtgtgtgtgtacgtgtacgcaatgtttagcatcccacttagaagtaagaacattggatatttggttttctgtttgtgcattcattcacttaggataatggcctccagctacatccatgttgctgcaatagacatgatttcattcttgtttaatggctgtgtagtattccatggtatatatgtaccacattatctttgtccagtccgctgttgatgggcatccgggttgattccctggctttgtgggttgattcacatgctatcgtgaagagtgctgcgatgaacgtaggagtgcaggtgtcgtttggtagaatggttccttttcctttgggtagatacccagaaatgggattgctgggtcgaacggtaattctatttttagttctttgaggaatcttcaaactgctttccccagtggctgagctaatttacattcccaccaacagtgtatcagcatggtgacgtgatttggattcaggcagtctgactccagagctgtatcttaactctaaagctctgtgtgctactgcagtggttttcaaacccgagcaagaccaggtgtggtggctcacatctgtaatcccagcactctgggaggccgaggcaggtggatcatttgaggccaggagttcgaggccagcctgggcaacatggtaaaaccccatctctactaaaaatgcaaaaattagccgggtgtggtggcacatacctgtggtcccagctattcgagaggctgaggcaggagaattgcttgaacctgggaggctctgagaggttgcagtgagccaagatcatgccactgcactccagcctgcgcaacagaatgagtgagactccgtctcaaaaaaaacaaaaaaccctagcaaggatcagaatccccagagggctaggtaaaacacagattgctgggccccatctgattctgtaagttcctgattctgtaagtctagcttgagaatttgcattttgtggtgacactggtgcccctggtccaggaagcacgttttgagaaccatgagctactgtaataggaagcccaaatgaaattggcctgaaataacgagatttatgatctcatataacaaagaagcctgtaggtaggcagcacagcagcacaggagttgactaagcagttccacaatgcctgcagggaccccatccctctccttcaagccactctgccatccatggtgtgtctcctgtgtccctaggctccctgcatggccacaagatgactgccaaggctccagttggcacacactgacagtgccacatccagcagcagaaagagggcatctctcacttgctgtgtatctctttaagagtgaggaaacctttcattgattccctgcctcccagatttccctcatatctcattggccagcatggtgatatgtgaccctgcccagagaaaccagccaagggccaattaggattgaccctctggggctggggctggggctggggctggagccggggccagccttacctgaagtaggtagcacagggaggagagtggctacaggaatgaaatcagagtaccatttaggaaaggactgggaaagggggagggatattgggtaggcagacaattggttttgctgcagaaataagtggaacacagggaaagcataatgcccatgcatttttgtcatcgtgcttaccagctttgttttgtaattacctgaatcaggacttagctttttgttctctaatcatgcccacctttgaaactgtgcacaaagtcccagtaccacaagaactctgaatcttgttggaataccaagtattctgtctggcaattcagggaaacttgagttgggtgatgaggcagcagtctgaaggttagagtgcgaggtctttgagagcactcactcactctgcccagaaacacctgggtctcacccatctctctgctcctgactccctcccccctcctcctacccttccttgcaaaggctgtttccccctctgagggctgttcttggatgaaaggagaggatgccagtcaagtgcttacccccaggggccagcgcatggtaagtacttaagaacgtggcctctgctattaacatattaaatgtgactttttatgtatgtatgtctgtatctatgtatgtatgtatgtgtttgttgtttttagagacagtcttgttctgtcacccaggctagagtgcagtggtgtaatcatggctcactgcagccttgatctcctgggctcaagcaatcctcccgcctcaacctcccatgtggctgggaccacaggtgcatgccaccgtgcctggcaaattttttttttttttttttagttggagtctcactctgtttcccaggctggagtgcagtggcgcgatctcggctcactgcaacctctgactccctggttcaagcgattctcctgcctcagcctcccgagtagctgggactacgggcgcccgccaccacacccggctattttgtatttttagtagagacggggtttcactgtgttagtctcgatctcctgacctcatgatcctcccaccttggcctcccaaagtgctgggattacaggcgtgagccaccgtgcccagcccatgcctggctaattttttaatcattcatagagacgaggtctcactttgttgcccaggctggtctcgaactcctggggctcaagcgatcctcccacttcagcctcccaaagtgctgagattacaggtgtgagccaccgtgcccagcataaatgtgacttataataaatattttataatcctgcacccccttaccaaaaaaaatctatgaagagtgaccatcccttttgcagactgaaatttcctgaggatacctgttgctactgctcgtggccacactgtaaagccattgccctttgagattgcaaagggctgaggaatgcagtgtgggctctgagccagactgctgagtgcaagttcttgatccatcttgggctccctgttttactttgggcaagccacttagccttgcatgtcttagtttccgtatctgtaaggtggagctggtaatggtactgtcctcctaggttgttgggaggattcgaatgcatcaaagcacgtgacatgcttagacacccctcccccccaacccccaacagcacccgacccaaagcagcactcatacaatatgtatcagctaatctttgaatattctgtgccagttcattcacaggggactataagctccctgtgggcaggatttatgtggtttttgtttactactgtgtcccagtgcctgactcagaatagacattgtttacatttgtgtgtgtggatgaaaagaaggatggtaagagcctttcttaatttcttttccttcagctgcctggaatttaaactctgacctgagctgattactcggtattttgaaggaataaagtggacctgactgactctgagggcagcatgtgataagtgcagctgattgttgagcatttttgtgagccacaagcatagtgctcaccataaagatctcacttggccaggcacagtggctcatgcctgtaatcccagcgctttgggaggctgaggagggaggatcgcttgaagctaggagtttaagaccagcctggacaacacagtgagacccttgtctctacaaaaataataataaagctctcactgactcttcatcccatttcatagatgaggaaactgaggcccagtgggagcacctgcttcttcttacaagaggagatctaaagtagtggttaaggccggccgcggtggctcatgcctgtaatcccagcactttgggagaccaagtcaggtggacctcctgaggttgagagttcaagaccagcgtggctaacatgttgaaactccgtctttaataaaaataaaaaaaaaagtagctgggtgtgatggtgcacgcctgtaatcccagctacttgggaggctgaggcaggagaatcccttgaatccagaaggcggaggttgcagtgagctgagatcgcatcactgcactccatccagcctgggtgacagagcaagactctgtctcaaaataaaataaaataaataaataaagtagtgggtaaaaactggaaccttggagctcctctgcttgggttagatccccaccccagcactttcttcctgtgtgacctccagcctatgacttattcgttgaacttctcatctgtaaaataagaatgctgatagttcctccttagagggtcgctgtgagggttaggagagagaattcatatgtagcacttagaacagcgccttgtgcagtgagcattccggttgtggttgttattattagccagccaaagccgttcagttgtgcttccaaagctggctggaagagtccagcgaccgtgtttaatcattaagctgcattgcctctgtgagctagtgcctcctctgcacgggccaaggagcccgcctttagattgtacggttctgaatgaagcatccaggcgcaagctcagggcaggggacggtgtgggcacaagtccagccctggctctgtcagtgaacaggtggcctgtgcctgaatccgaggtaataggcgagccgcctttgttacctttgagctttctttcaagcccattcagactcctcagaccacgtgtctgatgagtaaggaggccttttctttccctcccccaaagggaatgttggcaaaacagctttctttgggaacgcgcctgttcacgacgaccagccatctcctggggaactccggtggctggctggcgtgttcctgcggctgttgaataagtcgctgttaggagctggcacggcaggttcccgtttccgcattccaggcacccacagcgggctgggggcgggcaccactgaggtcggcctggagagccaaggcaggtggcctcgccctgggaggaccagggacaggaggagtccacctggggctcccctgacagccacctgcccactttgtgatcagagccgtgttcggggagtctttcaggtgagcgatattcattaaatttggcagtgacttgcagagaaagttcatcatgtttcttcctctccggagttagacagttagctttttttgttttctctttttttcccccctcttctccctgaaatgtttacctgtctgctcctaactgtgaagaaagagtgggccgggtgttgacggactgagaaaaatggaggacatttctcccaagagaaggaatcggtgactcttttagtgagttgagctcctgctggatgcagacttctgtgccggggctgggggcgatcccagcctggtgtagatgagctctgtggtctcgcctgagtccgctttcctctctgggcctcagtttcctcttcttgtgaaatgggaactagcagcagtgcccaatgagtcatctatgtaaactgcttcaagcctgggcactgagcggtgctcaagtcccccctccccaaccccaggcccccattttccctgtgtgacctcatctgtgacctctcagctgcttgcttgctgtaccccagctgcactggcctcctgctgttcctccctcggagactttgccctggctgttccctctgcctgcaacacttcccctagaattccccagcgccgcctccctccctccttccctcaagtctctgttcagatgtcaccttctccatgaggcctctctccttattaaattgcaccttctccctcaccctcgcccttactctttgctttatttttcttcatagcatttacttccacttgacatattttgtctatgctctgcttcccagctctaggctccatagaagcacaggcacttttgtgtccatccttgtagaaccgttcctggcacgtggtagatgcgggctaaattgtgatatgaatgaatttatatcaggtgcaacatgatccaaggatgggtggccagccccgtttggggtttgaggagggtgtcagcttttccaggaacctgtggctgtgggtgaggcggcatgtgcagatgcctccccctggtcacccagtggctctctggcacctgcctgcagcatccagccctctgccttcctgtcctgcaacccctgcagtctgtgcagcccaggcctggtagtgactcatctgggcagcctgggtgcctgtggcatggaacaggaaagcttggcctagtaagtggagaggatgtcaggttcatttaggtggagaagactgtgtggaagataccacccatatacacacatctcatatgtatctccagcccctgcttgctgttcctgcagggggaggccagggagtgcctgggaagtagcaattaaccagccaggcacagttgagccatctcccctgctttaatgggtaataattcttgctctggggctgaacaagttttaattaaatggtgagcgcgaagaatctgaccgtgtaatagctgacacgtcctcatctattttctagctcccggtgtcagcaattgattctgtaaaaatatcctgggcagggcttccctgagctccatgagtgaggtcagtggccttcttggatttctcccagcatgaggcaccaggggactgaggtgctgatggacttcgcgccgctgtagcatacatcatcgcatgtcaggacctgctgctattttaagaatgtgcagagcaggagggaagctcttctgcaacatttaacacatatgtcccttgagctcccagtgcgggagtttggggttgagttgaggactctcctattacacttatttcatgtaatgcctgagccccaacactgtgggcacagtagttctctgggccacaggttccttatctggaaaatggggataattaatagatgattaaacgagaagtcaaagtgagatcaggtgactcagtgctgtgtctagtgcatagatagcaaattagatttaagaaagacaattctttttaagaattcttttcaagcccctttttaatattttcggtctgtccttttttgtgcccacccccgaccctggttccacccctgtgtcagcatcctcccgcaatccttcacccatggtaacaatcaaggactgtatgtatctttccacatttttctccatggttatataatcctataggagataatattacacttattttcttgcattttgctcttctcacatagcagtgccatgtggaatgcctctgagtccttgcatagtgctgagatttgctctttttagtggctgcgtaacacacagtggtgtggatgcaccataattgatttggccaagacatcactgataggcattcccttttctcctagagtttttttttcccacaaattattatttttattgataaccttctttaattagattgcagatgtccaacctgtttggccaccttgttaagttctaggcctttgagaatgaatatgaagtaacagtagtgcaatgatgcctctcgtccagatagaagatgtatttttggagggttctcaccaagtccagcactgtgttgaaccaaaaagcattttttaaatgcttttttattattagaataattaatagattcatcacacttagccagattagttgtgtttaatgtacttattatgaaataagagtgaaaggacagttcatgttttttcatattaacaatcttggttggaaatcagaatgtgcaagagatttttgttgggatttgtgattgattgtgtgtttctttttcaggtggcactttagttagggactatgcttgtgttcaggaaacttgtacagcgttgtacccagatagagatttgttctagttgtctattgctgcaccacaagccacccctaaacttaaggccttaaaatgacagcagtttcttatttcttgtgaacctgtggttgactggggctcagcaggatggttcttctgctggtcttgcttggggtctgttatgtggctgcagtcagagggtggatggggttggaacattcaacatggctttactgaaatggcaccttgggaatggctgggtccatgtctgtccatagtcttgggacctctcctttcatgtggcctggccagcctgtagctggacttataacacggcagctgagggcttttgtgagccttcttaaggcatagatttagaactggctccacatcacttctacttcattctgttagttaatgtgagttgaagagtcagcccagattcagtatgggagggatatcacaaaacaagttccaggaggtgtggtccactgtgggcacctttctatcctggctaccatggggttcattttctcatgtaagaagtgcagagctcagcaggctaaggtgacgctcaccttaccctctctctgctgctccaggtcaccatccttagcctcatattcataaaatggttgctctacctccagcctgatatccttgtgatgggcaggcagaaccagggctctaaggaaaggagacagcacctgtatcaagaagccaaagccttccctgaaatctttagcagacgtctgcttgtgactatttggctagaactttgtgacatggccactccttgctgcaaggacatctacagtttttcagttgggcccattgccaccctgagcaaagggtcaataaggaagaagacggagagtggacatgttgggcattcacctgccagcactccatccagacagccacagaagtggtgggtaaacagagacagcatacattcacttatcaactgtttagtaaattcctggcatgggcagggcactgggcttctcccaaagactgtaagagtgtgcaggattatttgcagacattgaccagatcattgctgagctcacctctctcatatcagtgttcgaagttagtctaatgataagaatagtagccagtctcattaagggcttaccttgtgtagaggaactgttacgaatacttttcataagccaactcagtgaatcttcacagtggccctatgaaatgggcattgttatcaccccctcttctcagaggcagaaacagaggcacagagaggttcagtaacttgccatatttcctctgacaagggcatggtggagttgagatgcagtctctcctggtctggctctggaggcatgtactgaaccatttggctatactgctttggttaattacaggaaacatttcttgttgaaatgaatatgtaattgacagcagaataaaacatgaaacaaaaaccacttactactccatcccctccactcctgcttcctgcctcattggtctcatctgtcagtaacctagtatatattcttcctcacctctttctaaatgcattaatttttaaaatcttttgagagtctgggtctcactgtgacacttaggctggaatagaatggttggctaatttttttcatttgtttgtagagatgggatcttgctatgttgcccaggctggtttcagactcctgggctcaagtgatcctcctgccttggcttcccaaagcattggcattacaggcgtgagccaccatacctggcctgtattaactttttaaagatggcctttggacacacagaattggattaatcataatgcgtggtgcatgatacactggcatttttggtccatgaaaaaaatattcatctatcataatgaacagccgttagcccactgtttgcccaagaacttgaatattaccagtaacttacatgtacctatgtggtacttcccattcactttcctgcctgctctctcagaagtgaccaccatcttgaattttgtgtttattattctttgctttaaaagaatgatttttgaactttatcaaaatatggctgagtgtggtggctcatgtgtgtaatcccagcactttgggaggctgaggcagcaggatttcttgagcccaggagtttgagaccagcctgggcaacatggcaagacctcatctctacaaaaaaatttttaaaaattagccaggtgtggtggcatgcacttgtggtcccagctacttaggaggcttaggaggaaggattgcttgagctcaggaggttgaggctgcagtgagcctggttcgtgccactgcactgtagccagggcgacagagtgaaaccctgtctcaaaaaaaaaaaaaaaaaaaaaaagaccaggcacggtggctcacacctgtaatcccagcactttgggaggctgaggtgggcagatcatgagcttaagagattgagaccatcctggcctacatggtgaaaccccatctctactaaaaatacaaaaaaattagctgggtgtggtggtgcgcacctgtagtcccagctactgaggaggctgaggcaggagaattgcttgaacccaggaggcggaggttgcagtgagctgagatggtgccactgcactccagcctgggcgacagagcaagactccacctcaaaaaaagaaaaagaaaaagatatactgtacatagttttctgagacttgcatttttcagctaatattatgattctaacattgatttagactggtaccactgggactcatgcatttttatttactgccatgtgagtattccactggctgaatataccatgtttttgttttaggcatttccatgccaatggacattttgttttcagattttttgctgttcacaggctgctgtgaatattgttacacttcctggtgcacatggacaagcatttctttcaggtatgtactggacatgagatttctggattgtaggttgtgatcatctttagctttgccagatattactgagctgctctttaaacatcccaccaaggatgagtttcttttattctgtatccttgtcacatttggttttgtaaaacttttttacttttgccagcctagtggataggaaatgaaatctcattgtggttaatttacccctgaagactagtaaggcagaatatcttttcattcatgtttctccttctggatattgcttgctcatcacatctgcttctttttctttttttcttttttctttttttttttttttttaggtggagttttactcttgtcacccaggctggagtgcagtggtgtgattttgattcactgcaactgcacctgctgggttcaagcaattctcctgcctcagcctcacgagtagttgggattgcaggcacctgccaccacacccagctaatttttgtatttttagtagagacgggatttcatcatgttggccaggctggtctcaaactcctgagctcaggtgatccgcctttctcagccttccaaagttctgggattacaggcgtgagccacagtgcccggccacttttgcttctttttcctattgaattgtaggtgttctttatatactgtggctactaatcctggggtggcagcctatttaacctaataaaagtttatgatcctcgggtcatcctttctgtagttgttttctttcccctgctattctccccccaattccatgatacctttttgtgtacctccagctcacagtgatccactctttgaaacagtcctcaacttctgggcatttgtatatgttagtacagatgtatgactgactatacctgttctacccactgtgccgttgcattttggtatcagatgtatctgttaggattagtttcaactacaggctggccatggtggcacacacctgtaatcccagctactcaagaggctgaggtaggagaattgcttgaatccaggaggcggaggctgcagtgagccgagattgcaccatgcactccagcctgggcgacagagtgagactccatgtcaaaaaaaaaaaaaaaaaaaaaggattagtttcaaccgcatataatttagtttcaacaaagtgacagtggcctaagcaagatagcttatttctctctcacgtaaaggagccccgtaatagacaggcgagcctgtgttctcatcagggacccaggctgcttccaccttctggctccaccacctgtatcctgccacctcatggtatgagacagctgcccaagctctagccattacgtcccaggaggcaagtaagaaaaaaggagacttaaattgtacacagcaagtctgcttacacctttgcccagaatttaatctcagtactatatgtagctgcaggggaacctgggaaatgtagttttatttcccatggccttattcttagctaaaatttagatttgattgctaagtgaaaaggggagactcaatattggagtaggcagccggtaatgtcactagttctgaggtgttccctagtggagctgaaaggagccatcagacaccaggatggtacctgtagatgatgccctccccacttttggttctttgattaattacacagatatttatggagcacctgttttgtacaggcactattctgggaactgggaagagagtaatggaaaagcaaacggggtctccacccttgcagagctcgtattttaaaagagcagctagatagtaagcaagtcagttacttagtgcgtcagagataaggggtgtgaagaaaaataaaggaggctgggcatagaggctctcaactgtactcccagcactttgggaggctgaggcaggaggattgcttgagcccaggaggtcaaggctgcagtgagccgagattgcaccgctgcgttccagcctgggtgacaggctaaaaaaaaaccctgcctaaaaacaaacaaacaaaaaaaaaaacaaaaaaaaagctttacctcttactaactcatgaccactctgttttcttctatatccaccaccacccaccctctactgtattattttaacgctaaatagttgagtatctgcaagataaggattctttaaagacataatgagaagaccattttaatcatgacaataattaacattaattgcttacatcatctggtatccgcacagtgttaacatctcagatcatctcataaatatctttctagaattggtttgttccaatcaggacccaacagggctcaccattggagttggttcatctgcgtgtgaagcctcatttaatctatggcttctccctccctccagctcactgcaacctccgtctcccgagttcaggcgattctccacctcagcctccttagtagctgggattataggcatgtaccaccacgcccagctaatttttttgtatttttagtagagacagggtttcaccatgttggccaggctggtctcaaacccctgacctcaaaggatcctcccacttcagcttcctaaagtgctgggattgcaggagtgagccaccacacctggcttgatttttctttgtttttctcttgcagtttatatgttcagaaaggccatgtcatttgtcctgtatatgatcaggcctggatctgaccgatcatatccctgttgcagtgtttaacttattcttctatctctgtgtttcctataaatgaatcattggatttgcagagtaggtgaatttcaggtttgagatgtacacacacacacacatacacacacacacacacacacacacacacacacacactgtttcttttttggcaggcagggctagccgtcctcctaggtgttgctgtgtatccgttagggatgtaaagctgggggcccctttctgtattggtgttagtggccgtggatgaccattgctcagagccattatttcatttggggtgtacaaaaattgtgctgttgtaattctgtccacctcttcatttattagtgggactattcctctagagagaacctgcccctcatctattattcagttatcctgagggtactggctcttttgaacttttgtttgccttagaaatgactattgaacaattgggctggtggtttctaatctgttgtgtgttttttttttttttttttcctgcagagattcaaatcttccttgtttttatgttcattcatttgacatttgccggtctccaccactgctcataccctgtcctgagcttgccaataaacagatgaaccagtccagtcatctcattgtgtgggcacggctgctccaggccttacctttgaccgggtggggccttgcgggtgtttgtcgaagtaatgagactgtggacattcccatctttctctctctttcccctgtcgtgcattgtcagaccttatagtctttggtgagttcctgctctacgccaaggaattagtcctttatgcttggggcaagaggtttttgagtatttggatttcttctgatctgaaactccattcctagacaaaagaacaataaagggctctactccattgcagaggcaagccctggtaacctggccaggggcgagccctgaccccagccactgttgtctgggtcataaattcttgagagcagtagcacgcttgaaatcatttagatgctttgggatcagttattcattatattgcacgatatctaagggcctctttgctgctagagattacaacacattcctcctgggggcagaagatttattgtgcagtgatgtgcaaactcattcattcattccattgttaacttcttcattcagcaaatatttactgaacatcacatatgcttccagtgccggggacggagcccgataaggtctgtcctcctggagttcattgtttaggttgggggacacagtcaaggaagaagtaaacagattaataagataattccagatggggatgaataatgctgtggagtcaggaaagcagaatggcgagagagacacgcctggaagtagaagggattgtgggaggctggaaaactggggtcgttgggggagagcctcctcggggtggtgacatgccagctgagagtggagtggtatgcaaaggtgccagccttgtgaaagatcagggaagagctttcccagcagagggaacagcaggtgcaaaggcgctgaggctggaatgagtttgacgtgtgaaggagtgtggggtgggggtgggaaggagggggagggcaggagacgggggtggcgggggagcctggtgagggtgtgggtttgattcagagtgtcctcccatgccctctggctacggcgtggagcatagattgaaggtgggagtggaagtagggcagtgaggggcagcctgttttgcagtgaggagagaagtagagtcccggatgagagtggtggcaatggggacaagaagtgggtggcccaacagaacttgtttagggattggtcatgctgggtggtgagtgggttgaaaggtttaccagcgggttcaggctttggtctgcaggattttgtggtagtaaggatagccccagtcccctttaacatgggctgaggttttctttcaatttttgtatttttagtagagacaggttttccaggctggtctggaatcctggcctcaagtgatccttctgcctcggcctcccaaagtgctgggattagatgcgtgagccacacccagcctctttctctctctctctctctctctcttttttttttttttttttttgtagagacagggtcttgctgcattgcccaagctggtatcaaactcctggcaccaggtgatcctcctgccttggcctcccaaagttgctgggattctaggcgtgagtcactctgcctggccaagagctgaggttttctactacacacatctcgtctagccctcatatggtagactcttaatgcccatttcaaccccgaagaaactgaggcccagagaagtgaagtccttaatccttgtcacataggctgttggggctggattggaacgtggatagccccacccacagtccgaccacgctctcttcttctccctcactccaactacagctgttaattcatggtattgacacagcctgtgtccaggaggagccaaatgtcagtgtcatacatttctgaagtcaagaggggatcaaatccacatcagtggccttttcaccattcccactaacctggattccaacacaccttttatgacagtaattattacagggcagaaaacggggactttcgattgctgaccactttacacgaggcccagataaggtgtgcatctaggccctggactttgagccctgagcctgcttaactgattgggctgaaagtgttctcacccatcaaatcctccttatcaccttctccagaactccagctgtaaagggagctcaccactcacagggtgtgtgttgtatgtgacacctcagccagccaaatggctttacttggtgtcctctcagaagaggtgtgacctccttctcttagcgtggtctcctgtggaaagtcatgttgagtttggtgctgcctctgcttgcgtttaggcctcttgacaaggattgtatgttgatcaattttttaaaagtgtttttaaaaaatctttactgctttaaaatgtacagaagccacacgctggctgtaacccgttccaacagcagagcagtatgtagagaaagcatgggccggacacgcctgtaatcccagcactttgggaagcctaggtgggcggatcacctgaggtcaggagttcgagaccagcctggccaacatggcgaaaccgcatctctactaaaaataaaaaaaattagccaggtgcagaggcatgcgcctgtaatcccagctacttgggaggctgagacaggagaatcgcttgaacccaggaggtggaggttgcagtgagctgagatcgcaccactgcactccagcctgggtgacagagtgagactccgtctcaaaaaaaaaaaaaaagcatgaagatctgcttcattgtcttgacctagtggcctggctttgcccccaggtcctgcccagatgcatattaagtgcacacttccaggtcttggtctgtgcagtggattgtttgttaagagccagggtgcctgggttcaagtcctagtattgctgtgtactgactgtgtgaacttgggcctttacttaatctccctgtgccttgatttctccatctttaaaatgatggtgatgatcccaacctcataggcttttaaggatttaccctgttaatgtattaatatgtaaaagaatagtgcctagcatgtttgttaagtacaggtgatccttgatggggttatgttctgatgcacctgttatacgctgaaattacccttaagtcaaaagtgcattcacacctgtcatcccagcactttgggaggctgaggcgggcagatcacttgaggtcaggagttcgagaccagcctggccaacatggtgaaaccccatctctactaaaagtactaaattagccgggcgtggtggcaggtccctctaatcccagctactcgggaggctgagccaggagaatcacttgagccctggaggcggaggttggagtaagccgaggttgttgccactgcactccagcctgggtgatagagcgagactccatctcataaataaataaataaataaatgcattcaatacacctcacctttcaaacatcatagcttagcctagccttccttaaatgtgctcagaacacctgcattagcttatagttggggaaaaataatctaacataaagcctattttatagtaaagtgctgagtatctcatgtactgcttattgctggcctggaaaaagttcaaaatgcaaagtacattgaaattgcagccatttgtgccatggtaaagtcaaaaaattgcaagtcagagactgtctgtactcatgtcttaggttgtttttttttttgagacagagtcaaaactctgtcatccaggctggagtgcagtggtgcgatctcggctcactgcaacctccacctcccaggttcaagtgattctcctgcttcagcctcccggtagctgggactacaggcgtgtaccaccacacctggctgatatttttttgtattttttgtagagacggggtttcaccattttgcctagactggtctcgaattcctgagctcagcaatctgcccacttcagccttccaaagtgctagaattacaggtgtgagccaccgcgcccagccagctatttttttttattatacatctatgtgagtaccgcagtttgttttatagacatactctaggtatgccgtcctgcagattacacttgagtagtctagcttaagagatccccccgtgtctgtgggtcaaggtctgtggcattctttttaatggctacatagcattccactctatttgttgcctgttgttgaacatactggctgttcccatctttcattattggaactctgaacatctcacacacaaaaatcatttgtttgcttcttaagtttttcttgggacaaagtcctagagttgcaattcctgaaacagagtgtctatttttaaagacttgtggctgggcgtggtggctcacgcctgtaataccagcactttgggaggccaaggcgggaggatcacctgaggtcaggagttcaagaccagcctggccaacatggtgaaaccccgtctctactaaagatacaaaaattagcctggcgtggtggcaagcgcctgtaatcccagctactcaggaggctgaggcaggagaattgcttgaacgcgggaggcagaggttgcaatgaaccaagaatgcaccattgcactccaacctgggggacaacagcgagactttgtctcaaaaaaaaaaaataataataataataaagacttgtgatatttattgttgacttgtattccggaagggtccagtacaggagttctggtttcctggatcctcaccaacgctgggctcacactgcttctttccctccccacacttttttttgtgtgtgtgtgtggagatggggtcttgctctgttgcccaggctggtcttgaactcctggcctcaagcgatcctcccccatcggcctcccaaagtgttcggattacaggcatcagccaccatccatggcccagaatgctttttaatctttgctatttgggtaaccaaaagttaccaaagtaactaataatttacatttatttgatttctggtgaagtttattgtatatgtatctgtttattaatcatgtatttcctagttaattacctatttctctggggggtatttttatttcttgttaatttgtggaagatttctttacatgttgaagatatgaatcattttgttatgttgcaaatttatattcctaaattgtttatcttttagtttttttttgttaaacattcagaggcttcttaatttttgtgttgttagagctatttttcctttgtgttttttgttttgcttgttttatgtatgctttggctttcattttaggatgagataaatattttcttcctagttattttacggctttgtttttacatctaggatctgatatttattttggaattggttgtgagataaagatctagctcctgggccaggcgcagtggctcacgcctataatcccagcactttgggaggcagaggcaggaggatcacttgaggccaagaggccaggagtttgacaccagccttggcaacatagtgagaccccacctctacaaaaaataaaaaatctagctgggtgtggtggcgcacacctgtggtctcagctactggcaagactgaggtgggaggattgcttgagccctggagttcaagattatagtgagctgggattgcgccactgcactccagcctgggcaacagagtgagaccttgtctcttaaaaacaaatccgtccaggcatggcggcccacgcctgtaatcccagcactttgggaggccgaggcgggcggatcacaaggtcaggagatcgagaccatcctggctaacatggtgaaacttcgtctctactaaaaatacaaaaaattagctgggtgtggtggcaggcacctgtagtcccagctactcaggaggctgagacaggagaattgcttgaacccaggaggcagaggttgcagtgagccaagattgcgcctctgcactccagcctgggcgacagagtgagactccatatcaaaaaaaaaaaaaaagtccaactcccccacctcagtagtcaatgagttgtccctatcctactgactaaataatccgttctttcccactaatatgaaactcaaacttactgtgagccaggccctggtctgtcaagtttacctttctagtctcctgccgtaactcaatgaagcagattgataatattcccattcacagcaagaaaaccgaagcacaaagaggtgtcgtttcttgcgtgacatttcacagcttggatggggcagagcctggctggaaatattgcagatttatttaataaccagcccccttatttgtaatatgttttcagcagtttttcctgcagtttcttgccaaatctcccttttgtccacctgtaacagcctgcagcactttccctatgctggagttctatgttttaggcctgttctctgcctctgccctggccaagacttctgtggcaatgtcagatgccagtggaggctgctggcaggcgtggacgtctcagatgtctgatccttcaggagccccctccacggggccctggctaggcagtgaccaggatgtttctgaatccccttaagttaatggtggccacttaggcagcggaagtgtcatgaaagactcttctgtccccatggctgggccaaaccagggaagacgctgacatcaagcacaattgagaacaagcagcagtaggcaatgttctggggctattaattcatcctgggggaaaaaacctcacagtggattaaattggtttatgtaaagtgctgagaagagcccagcctgggcaacatgatgaaatcttgtatctacaaaaaatacaaaaattggctgggcatggtggcatgcacctgtggtcccagttactcgagaggctgaggtgggaggatcacctgagcctgggaaggttaaggctgcagtgagccgtgattgtgccactgcactccagcctgggcagcagagtgagacccggtcttaaaaaaaagaaaaaaaaaaaaagaagagtggttggcacatagtaaacactcacatacatattagtcattgttcctctgtttccaaaggtaggaagaaagttcccaggaggtgtgcttagaatgtgggtaggcagataccactcgggtatttcctgagcacctatgccatggcacacaagtgctggggccacagttagggctcaggacaggcacggcccccacgctcttggagctgacattctagaaggcaggtggatcctagatacaacagatacatgacgtaatgttatgtagtgagaagtgctagagattgagggaggctactgttttattagaagtgaccaaggcaggcctctaaagaggttgcctttgagtcaaggcctgaaagataaggagccagccgtggaaggcacattccaggcaggaccacagatgcaaaccccaaggctggagcttccagagcttgttcccagcaattcacagatgccactgtggcaggagggcagcgggggagaatggcaggagatggcatcagagagggagccaggtggaccttaggttcttttggttgaaaataacagaaacccaccttagacccacctaagcctcaaagaattgtgagatgcctcctgaggcctaggacttgcactgtctcctggcatcaggatcgataggcctgaggcctaggcgattttctgtctccatctcccatctctgtctcttctttatctctgctttcttctctctttgggtttctccaggcatttggccacctcattgctccttcttttatgggatttccaggtcgcaaccacagatggtcacctctcatccagtgagctatggctggagaataagcatggccatcccacccgtgcctgtgtacatgcacagttttcattcaaaggggactataaggccaggcacagtgactcacacctgtaatttcagcactttgggaggctgaggtgggcggctaacctgaggtcaggagttcaagaccagcctggccaacatggtgaaaccccatctctactaaaaatacaaaattagccaggtgtggtggcgcacgcctgtaatcccagctattccggagattgaggcaggagaatcgcttgaacctgggaagcggaggttgcggtaagctgagatcccgccattgcactccagcctgggagacgagagaaactctgtctcaaaaaaaaaaaaagttggagaggggactctaggaagcctgaaagacccactcccctgctgtcctggcctagggtacatttcccttttctcatatgaagcaacatcatatcatggttaagaacatggccacattggccgggtgcagtggctcacgcctttaatcccagcactttgggaggccaaggcaggcggatcacaaggtcaagagattgaaaccatcctggccaaaatggtgaaaccctgtctctactaaaaatacaaaaattacctgggcgtggtggtgcatgcctgtagtcccagctactcgggaggctgaggcaggagaatcgcttgaacccgggaggcagaggttgcagtgagccaagatggcgccattgcactccaacctgggcgatggagccagactgtgtctcaaaaaaaaaaaaaaaaaaaaaaaagagtgtgaccacattgtctggattcagagctctgccacttgctagctgtgtgaccttggactcatcacctcactcttggggctgcagttttctcacctgtaaaatgaggatgctaaagccttttacttcagggtgtggttcagagcattagacaaacttaggtaaaggactcagtctgagcctgatacacagtaagcactcaaagtattagttttcatcatcatcgttgtcatccttacttttccttcctgaggccggatggtgctctacagttcaagataggacttgggaataaagagcgtaggattgatctcagctctgtgaccttgcccaagtgagtaacagctttggtttcttcatctgcgtagtaaggacaagaaagagcttacagggctcgatcattggatgtacgtttgtcgtctgagatttggggcgactggaaattcaagagatcccaagttccctgctcagtgcagccccagctcctgatcacacttgaacgcgagctgatggcgggcttggttctagggcctgcctcgcctctgtcatgaaggctgcgcggggcccttctgtgccgagactggcgcttgctccccacaagcccgtctgctgctccctccgctgcgagccctcccaggtctgatccgcctgtccccagtaccccggcatgcggcacttttccttcttctcttgtgaaaggcagatctggaagaagcttctggggaaatgctgtgtttgtgtctggttatatctattccccagacggtgattcttaaacctggctgtgggttggcatcacctggggaatcttggtaacagttgggattctctggcttcactcctggagcatctgctcccgcaggtggagaggaagatcatctgctggtttggccgccctacaaccattcaccattcttttggggttttcctgttgggaactgctcttcctccatcccgtccgttcacttactgagaccgctgtgtgcaatttattatttaccccaggcactggggatatggcagggaatctggaatatgcccttgaaactggaattgtgtctgtccgttagatcacagtaccgtaaggctgtcactttctgatttttataattgtactgtgatccagagattcttcttaggaaatacccacatcttgaggggttacaaacaagagcaaattaactggaaaagggaagcaaaccagtgttggctgaacaaacatgaaaatgactacaatgtttatcttcagttttgggagaattgtcatgaagactcaaccacagtgtcatcctttgtacagaataggattctaatcaggagaccagtgctcatgtgcacagctttgagtgtgaagatctaaaaattttagttggtaggatgattacagattattttcatcttcctctttacagattattttcatcttcctctttaaacttttgtatatttttcacattttctagaaggaagttttagaaacagaagtgggaaaaaaaacaacttaaaaaaagccccgggccaggcgcagcggctcacacctgtaatcccagcactttgggaggctgaggtgggcggatcacgaggtcaggaaatagagactatcctggccaacacagtgaaaccccgtctctactaaaatgcaaaaaattagccgggcatggtggcgggcgcctgtagtcccagctactcgggaggctgaggcaggggaatcacttgaacccaggaggcggaggctgcagtgagccgagatcacaccactgcactccagcctggcgacagagcaagactgtctcaaaaaaaaaaaaaaaaaaaaaaagccccactgttgtggaatgtcctggtctacctggtttggacttagaaatgccttaggagtagcctgggcagttcaggtcattccttatcttcctgccatagggattggttcaaggaagggaggaggtgagtcagtccaatcagaattaagacaggtctttctctggagctcccaggaaagaagaggagctttcttcctatggaggtgccaagttgtagagtgtaagcttaatgctgctgggggcctggggaccatctttgctcagagggtcgagtggaaaggagatggaaataattcattacagacaaattctttgggtaactgaacttctcagtaatgggagccaaaacattggccctttttcccctcaagtcagtttgaattgggtctctgccacttgcaaccgaaagagtcctaagtaatacagtaattttagtggaccctagaatctatatttaaatttaaaaaattctctgccaggcgcagtggctcatgcctgtaatcctagcactttgggatgccgaggtgggtagatcacttgaggccaggagttcaaaaccagcctggccaacatggtgaaaccctgtctttactaaaaatgcaaaaactagccaggtgtggtggcaggcacctgtaatcccagctactcagggggctgaggcaggagaattccttgaacccgggtggtgaaggttgcagtgagccaagatcgtgccattgcactccagcctgaggaacagagtgagactctgtctcaaaaataaaataaaatataaaaataaataaataattctccagaaatgatttgtatgaatcagatatttgagaaccactttgctagactttcctgagtggcggttcttagctttatgtgatcaacagactggcctggggaacttgttaaaatacagcagctctgttccacattgctggagattctggtttggggcctgaggcctgggtatctgcattttgaacaccatcctgggtgattgcatacacttcagagtgtgtgtatgcacagaggattcttggccgggcacggtggctcacgcctgtaatcccagcactttgggaggccgaggtgggtggattacaaggtcgggagatcctggctaacatggtgaaactccgtctgtactaaaaatacaaaaacaattagccaggcgtggtggcggaggcctgtagtcccagctactcaggaggctgaggcaggagaatggcgtgaacccgcattctcagcttacaatcctatccatagagggggcccaggatccttctcaaatgaatgaaagtagagtttaagtctgcagtttttttcctctttggaaaaaaacattcctttcctgcccatgacccagccttgcacactggccgctaaacctggcgtatcgcatcatgtttcaggaggaatttggtcagatctgtgcactttattaggataatggttgacccagtgtgtacctccccaggtaactttggaaagagctggatagagttcatgaccaattcggaacaaagtctgctcttaggaggaattttgctaatagtgggaaatattcaagagggtaatcactgacttagttcaaggtaatttaaggtgaatgcattcctcatgtgtgtgtgtgtgtatgtgtgtgcatgcgtgccaaacttacttgaggtgaaggaggggcgaaagcccttttactcgaatgaaaggaaatcttttgaattgacctatcggttcagaaaatcccttttcaaatcttcccttgagcagctttgcttttgaggcccctgaaagctgggaaagaaggggctgtgaggcctgactgactcctcgctgctggctgtacccccaggcacgtgtgattttgccattgtctgaaatcttgctttccccagaatttgtgccccatgctgagttcctacagctcagccaccaggaattagggcatgggttagccaggattattcaaatttaatctgatcatcgttaaacatttttgcttgcatcctccccaaaagaattttgataagcccctgtatacctccttgtacactgtaaagctaacatctaaaataagcttatggtaactttaaatttgtcttatttgtgggagaagaaaatagtacacattttgaaggtcgaatgtaattgaaatattttatgatgtggttagataaaaaaaagtttttactaccttattgagtaaagtacacagaagctgaaagcaatcatgtaaatttttccctgggaattttttcttggtggatctagaaaaattcagtggtcctgaaaaatgttccctttgaacaaatcagagccactaacctatactgctttgacattcatgatcctactatggttcagaaaatcctatttttaaagcccagtttcatgtttggcagaaagatacttaagtcagggaaagacaggcaagtctgggggtttaagtagctttttattgttcactaaaggctacttccccgaaaccaatattgatgttgtgtgtttggagtcctggaggtttacacacctctcggtcgtgctccttgggaaaatgggggagtgcacaacagcgggtgggcagtggggaaggagacaggctggtttgcagccagatcagttttaggaagaggaacttgtggatgttgaggatctgaacattgcttcccttgaaaacactgttttcaagatactcctgtatctgttaagtttccgtaaacccctagtgataagcacatccaagcgtgaagcctctcggctttaagaaccaggcggtttcatatggagtgggaagtccagaggtgattaggttacagaagttgtcaccaccaccgcctgtatgtgtgtatatatacacacgtgccataaaagtcacccattcagaatatgcaattcaggctgggcgcagtggcttatgcctgtaatcccagtactttgggaggccaaggcaggcagatctcttgaggccaggagttcgagaccagcaaggacaacatggtgaaaccctgtctctactaaaaatacaaaaattagccaggcattgtggtgcatgcctgtagtcccaggtacttgggtagctgaagcacgaggattgcttgaacacaggaggcgggggttgcagtgagccgggatcacaccactgcactccagcctgggtgacagagtgagatgctgtctctcaaaaaaaaaaaaaaaaaaaaaggccaggcatggtggctcacacctgtaatcctagcactttggcaggccgaggtgggtagatcacctgaggtcgagagtttgagaccagcctgaccaacatggagaaaccccgtctctactaaaaatacaaaattagccaggtgtgttggcacatgcctgtaatccccgctactcaggaggctgaggcaggagaatcgcttgaacctaggaggcggaggttgccgtgagccaagatcgcaccattgcattccagcctgggcaacaagagcaaaactctgtctcaaaaaaaaaaaaaaagagtatgcaattcagctgtttttggtaaatttgtgaagctgcataactatcaccacaatccagttttagaatattaccaccaccccaaaagatatccatcttgtacctctttgcaggcagtccttgcttccacgcctaggcccaggctaccactaacctgctctttgtctctgtagatttgcgtttcctgaacatttcaaatacatgcagtcatacagtatgtagtcttttctgtaccaggcttccgtcacttagcataatgtttctgcgcttcctccaggtgatagctcatatcagtcgttcatttgttcttattgctgaataatattctattgtatgggtaaaccacattttgtttattcgttaaccatgaatggataatttcattaccattattcgttaatggatacttggattgtttccagtttgggctagtatgagtagtgctgttatagacatttatgttcaggtctttgtgtggacatgttttcatttctgctcaggagtggaattactgggtcatttggtaactctgtttaagtttttaagaaactgccagattgttttccaaagtggctgcgccattttcatagatagggtctcatgatgttgtccaggctggagtacaatggctattcacaggcgtgatcatggcgcactacagtatcaaactcctgggctcaagctgttttcccgcttcagcctcctgaatagttgggaccacaggtgcgtgccaccgcccctggctggggtccagtatttctttatcctcaccaacgcttattgttacagccatcctggtgggtgtgcagtggtatctcattgtagttgtgatttgcatgtctctgatgactaatgctgttgatcatctttttatgtgcttattggccattcgtgtatcttctttggtgaaatatgtatttgtattgtttgcctatttcttaatcttgttatttcattgagttgtaagagttcttgatatgttctggataacactcatcagatatgtagtttgcaaatattttttcccagaaaatatttttatttttttagtcatgcctttggaagtataaaagttttgtttttttttttttttgagactgagtctcactcttgtcacccaggttggagcagtggcacaatctcggctcactgcaatctctgcctcccgggttcaagcaattctcctgcctcagcctcctgagtagccgggattacatgcacacgccaccatgcccagctaatttttgtatttttagtagagatggggtttcgccatgttggccaggctggtcttgaactcctgacctcaagtgatccgcccaccttggcctcccaaagtgttgggattacaggtgtgagccaccacgcccaccctaatataaaagtttttaattttggaaattccgtttatcaattagtcttttatggattgtgcttttggtattatatttaagaactctttgacccagtatcatgaagttcttctttcatgttttctcctagaagttgcatacttttaactcttgcctttgaatctatcattaattttgatatcatttttgtgtattacataaggggcctaaatttatctttttgcgtattaatatccaattatcccagctccatttgttgaaaaaaagaccattttcctccactgaattaggtagcactatggtaaaagtcatttgattattaatataagggtttgtttcttctgatctattggtttaaatgtctatcctactgctagtgccacagtcttcattactgtagctttaaagttactttagaaatcgggaagtgttaagtcctcaccttgttttgttttccaaaattgttttggcttgtgtgggtcctttgcatactgacaagttttcagatcaccttgtcaatatctgcacaaaagcctgctgggatttgatagactgtgtgttgactctacatgtcaatatggtgagaattgccatattaatgtttagtcttccagtttgtgtacaaagaatgcttctctgtttatttagattgtctttaatttctttcagcttttcagtgcttgtagctttcagtgtacaagtctacacttatgttaaatttattcttatgtattttttttatgctattgtgaatggaatttttttttcttttttttcttttttcttttcttttgagacaggatctcactgttacccagtctggagtgcagtggcacaatcatggccttttgggctcaagcagccctcccatctcaacctcctgcatagctaggactataggcacatgtcaccatgcccagctaatttttaatttaatttaatttattttttgagacagagtcttctgttgcccaggctggtgtacagtggcataatcacagctcactgcagcctcgacttctgagctcaagtgatcctctcaccttagcttctggagtagctgtgactataggcatgcatcaccatgcctggctaattttttttttatttttgtggaggcagggttttgccgtgttgcccaggctggtcttgaactcccaggcccaaacagtcctcctgcctcagcctccaaaagtgctggaattacaggcatgagccaccatatctggcctaaaaagtatcttatttagtggagatatttggagataggatgccacactttgtatgatttcagtcctttaaagttttttttaccttttcttttgaaataatttcagtctcacaagaagttgcaaaaatactacaaataggctgggcatggtggctcatgcctgcaatcccagccctttgggaggccagggtagttggattgcttcagcccaggagtttgagaccagcccaggcaacatggcaaaaccctgctctataaaaaattagctgggcatggtggtgtgcacctgtaatttgagctaccagggaggctgaggtgggaggatcacctgagcccagagggatcaaggctgcagtgagccatgattgtgccaccacactccagcctgggcaaccgagtgagtccctgtctgaaaacaaaaaacaaaaactacaaatgtttatctacatgtgaaagaatgaagttggacccttacctcacaccatatacaaaaattaactcaaagtagatcatagacctaaatgtaagagttaaaattataaaattcttagaagaaaacataagattatatatttgtgaccttgagttaggcaatggtttcttaggtgagaacaaaagctcaaacaacagaagaaagaacaaaagcacaaacaacagaagaaaaaaatagacacattggacttcatgaaaatttaaaacttttgtgatgcaaaggatgccatcaagaacataaaaagacaaaccgtagaatgggagaagataattgcaaatcatgtctataaaggacttatgtgctgaatatacaaagaactctcacaacttgacaatataaaaacaacccaatatagaacatgggcaaaggatttgaatggctctttctccaaaacatccaaatggcctataagcacatgaaaatggctcaatataattatcattagggtaatgctaatcaaaaccacaagattctatttcacaccaactaggatggctagagccaaaatgatgggcaataacaagtgttggccaggatgtggagaaattggaaccctcatacatggctggtgggattgtaaaatggtgtagccattttggaaaacaatttggcagttactcaaaaaaatatatacatagagttaccatatgatccagcaattccactcctaggtatatactcaaatactaatatatgttcacataattacttgtgcatacatgttcagagtagcgttattcgtaaccccagaagtgaaaatgacccgatgtccatcaactgataattggctaaacagaatgcgatatagacccacaatggtatattactctgtcatagaaaggaatgaagtactgatacagactacaacatggatgaaccctgaaacacacatgaatgaaagaaaccagacccaaaagagcacatcttgcttcatcccatttatatgaaatgttcagagtaagcaaatctacagagacagaaaatagattagtgtttgctgagggctggggatgctgtgaacaggaaatggaaagtgattgctaggagtacagagtttattttggagatgataaaaattttctaagctcaggttgtggtgatggtgaattacacacttttaaagggtaaatttcattcattgacgtttgatgtgattgttggtgtgtttggattaacatctgtcatttttgctgttttctgtatgcctcacatcttttttcctccttttattctccctttattgccgtctttctgataagcagatattttctagtgtttcatttttattttgttgggttttaaaaaactttcttttttttttttttttaattgggtctctagggatcacagcatgcgtctaaatttatcacagcctacttcagattaatattaaaacttagttctagttaaatatagaaattttgctctaatatagtttcattttcttttccctcttttgtgttattattgtcacatgttacaagccccacagtatggttttataattattttatgaaatcttacatcttttaaatcagtcgagaagaaaagaaaaaatgtatttatgccatcttttatatttgcccatgtatttaccttttctcatgttttttctttcttattgtaaattggagttatatggcctcttttcctttcagcctaaaggatttatgtaatatttcttacagatcaaatcttctagcagtgaattctctcagtctttgtctgggaatgcctttattttgccttgattgattgattttggtgcagggtcttgctctgtagcacaggctggagtgcactgaactgcagcctcaacctactgtgttcaagcgatcctccacctcagccttctgagtagctgggactataggtgcgcgccaccacactcagctaattttttttttttttttttgagacagagtctggctctgttgcccaggctggagtgcagtggcatgatcttggctcactgcaagctccgcctgctgggttcacgccattctcctgcctcagcctcccgagtagctgggactacaggtgcccaccaccacgcctggctaattttttttttttatttttagtagagacggggtttcaccttgttagccaggatggtctcgatctcctgaccttgcaatccgcctgccttggcctcccaaagtgctgggattacaggcgtgagccactgcgcccagcctcacactcagctaatttttaaattttttgtagagatgaggttttgccatgttgctcaggccggtcttgaactcctggaccctagcaatcctcccaccttgacctcccaaagtactgggattacaggcatgagcaactgcacccagccaattttaaaaaaaaatatatttttttttgttttgagacagagtcttgctctgtcacccaggctggagtgcagtggtgtgaccttggctcactgcagcctccacctcctgggttgaagggatcctcccgcctcatcctcctgagtagctgggcttacaggcacccgccaccacacttggctaatttttgtatttttagtagagatggggtttcaccatcttggccagggtgatcttgaactcctggcctcaagtgatccacccgccttggctttccagagtgctggaattacaggtgtgagccaccgtgcccaacccttttttttttttttaatttaaaatttttctttagtgatggggatctcgctgtgttgcccaggctggtctcaaactcctggcctcaagttatcttcgtacctgggcttctcaaagtgctgggattacaggcatgagttactgtgcccttctccaccttgatttttgaaggatagttttgctggctatagaattcttatttgacagtttttttttcttcagcattttgaaaatgctatcctgatgtcttctggcctccattgtttgtggtgggaaatgagctgtcatttgtactgatgctccctgtgtgtagactttttcttttcctactttgaagcttttctccttgtctttgtctttcaacaatttgactatgtttaaaaacaaaacaacacgaaaaccaatttgactacgttgtgtccagtgtggctctctttctatttattgtatatggagtttcttggccttcttggatgtgtaaactaatgtgttccatcagatttgggatgttttgggctattacttgttcagatttttttttctggcactttctctctcctctcataggactcccattatgtctgtcttgatgcctttgatgatgtccctcatgtctctgaaggcctgtttattcgtattcaatctttcttacagattatttaaattctgtacagattatatactttttttgatctatctttaagcccactggttcttttcaaatctgccgttgagcccctctagtgaattttttatttcagttatcagaatttccattgctttttttctaatttctatttattatttctactttcctttaattctttaaatgttattttatttatctttgaacatacttataatagctgtttgaaatgtaacttgtaagccgtctagaaggcaatttctattaactgattcatttcctgagtatgggtcacattttactgtttgtgtgtctcacaatttttctttcattctttttttttttttttgagacagagtctaactctgttgcccaggctggagtgcagtggcacgattttggctcactgcaacctccgcctccggagttcaagcaattctcctgcctcagcctcccgagtagctgggattgcaggcctgcgccaccacgcctggctgatttttgtatttttactagagatggggtttccccatgttggccaggctggtctcaaactcctgacctcaggtgatctgcccgcctcggcctctgaaagtgctggggttacaggtgtgagccaccgtgcttggccatgagccactgcagccggcctttttttttttttttttttttttgagatagggttccactctgttgcccaggccagagtgcagtggcaggatcatggctcttctcagccttgacttcctgggctcaaatgattctcttgcctcagcctcctgagttgctgggactataggcatgcaacaccatgcccagctttgtgtgtttggcgagggtgtgcacacacatgcatacgtgtagggatggggtcttcctatcttgtccaggctggtctcagactcctgggctcaagcgatcctcctgccttggctttccagagtgttgggattacaagcgtgagccacctcacccagcctcagtttgttttgttgttgaacactgaacattttagatcatacactgtagcagctgtggattctgatttctaccttccaggccatggttgccgttgccatttttctccttttgttttgtttactgagtatcctgggctaattctttggagtttgtccccttgtggtatagactcttttctcttttaaaaaaattgttttaattttaagcataacttactaggggttgcctttggttcagcatggtttagtggtcagattaaaggttgtgctgaaacaccttgagccaataaagcttccatcctttgccaatggatctgtgtctgtgggttggggaatattttcaaagttcagtttcttccttttttttttccaagcagttcctgagtcggccccagccattactttctgcctggccatctggtgtctcccttgcacactctcaaggcctcatgttgggccagggatgtgtggacagcaagggccccctctagtctctctggagcttgtgtgcaaccttgtatatatgcacattgttccagaccagcagggctgcatgggaccttaccaaggccttgtgtggctatctcattccctggatcttcctgctaaatttctggctggtctacaggcctgctgctggctccagccagatcgtaaccacagtctagctgtgatgttggtcttccccatttgtttggcactaggccccagtccagccacaaagttttcatggcttgctctgccttggtcaaactgatggagctggtgcgtgtgatgggaggaaccccaaattaaacgccacatgttcccactgttcttacttgaagttcagcgtttatttattgagtttttgagtaactgcttcttgggtagttatatgcctttggttgatttctagaatcctcaaatggttgtgtttggcaattctgtctactttcattgttgattttggtgggaaatacttttctgagctcctctccacttccccattccagaagtctggttagcagctttgacttttgattttctctttaatttaagacatacccagaagtctttccaaatttccaaactttaaatatgtagctctagctacatatttcagtcaatttggaagctttttgagttgttgggtttggtttttgttttttaattttactttttagtatgaacaattgcaaacatataagaagtggagtttatattatccaggtgtgaccaagcttattttgtttatattctgactttgcccactcctcagcccattgttttgaggcaagtaccatatatcatatttcccttcacccataaatatttcagtaaatagttctaaagggagaagaggctgaatgcagtagttcatacctgtaatctcaacactttgggaggtggagacaggatggagtttgagactagcctgggtaacatggcaagaccccatctctacagaaaatttttttaaaaattaggcatggtggtgcatgcctgtggtctgaggctaaggcaggagggttgcttgagcccgggaggtcaagactgcagtgagccatgttcatgacactgtactccagcctgggtggtagagcaagatcctgtctcaaaaaaataagataaaaggagaaaatttctctttagaaacacaacggtgatataattatcacagctaaagcatttaatagtaatttctgtctttctttttgtttgtttgtttgtttgttttgagacagagtctcactctgtcatccaggctggagtgcaatggcccgatctcagctcactgcaacctctgcctcccaggttcaagtgattctcctgcctcagcctcccaagtagctaggattacaggcatgtgccaccaccacgcctggctaatttttgtatttttagtagagacagggtttcaccatgttggccaggctggtctcgaactcctgacctcaagtgatccacccgcctcagcctcccaaagtgctgggactacagttgtgagccaccgcgcccggccagcatttaatagtaatttcttaatatcataaaatagactcggggaaccttgaaaagtaagatgcccagtcaagtgaaatcagattctctgagagtgaggcctggacatcagcatatattagactccctcggtaattgtgacatgcagctgaggttgagaaccattgagttagatagaattctctatacccttttccagaattgttcatttctcatgtaaatgcattagcatgaaagtattctgatagaaaattatctgttttggggaattcaagaaaatttctttcctaatatgggatcaatttttatggccatcccatggatagtttataaagaattaatctcatctgttttctggcaaggggttctatatgaacttttaaaatcaaatttgctagtttgtattactcagattctctctagccataattttggtcaattttatctgttactctcctgaaaagaaatatgtttgcttcccacagggattatgattttatcagttctttttatatttctagtttttttttttttttttgagaaggcgtctccctctgttggcaggctggagtgcagtggcacaatcttggctcactgtgacctccgtctccctgcttcaagcgattctcctgcctcagcctcctgagtagctgggattacaggcgcgtgccaccatgcccggctaatttttgtatttttagtaaagatggggtttcaccatgttggccaggatggtctcaatctcctaacctcatgatctgcctgcgtcgttctcccaaagtgctgggattacaggcgtgagccactgctctgggcctggtttttgttttaaacttctagattcacattttctttgtaactttttgtcatgaaatgttgaggaaaagaacagcagactgtcttctacccacctccctgcccccacccctagtccctgcattctagattccttaattgtatctggaatttttctgatgtcggtatcatcaaatggtgttgggtgacattaaattccacgtcaaccctcctgaaacacgcccctgtctctccaggcttcatgtctgggacccagcgttctgtgtttgggcattgccacctcctgcccacctcagaagcacctgccaccttcctgatctttgtgtgcggtgggcacttgggggaaatgtgtatgttagaattggcagtctgtgatctatcacattattttgcacggccaaagtgtgtgccgggctcagttctccacccactctgctagtaccatttggttagacacagacagaatccccctgttcccctgccgtgtgatccaccgctgtttttttctgaaataagtgctaattggtttttaattccacttggattttaatgctgcccactgcagccttcatccagaaacactgatctgtttgaagaaatgttcctcaggaggaggaatcggcactgcagggagctggcaggttccgtccttcccagcttgccacagtggcctcgggcacctgccagccacacatgtccccttgcctcgggctcagtgagggatgctttgcagtgacttgctcatgatggcaaggacaggtttggacagagctccctttcctccatgtgtggagagctactgggcctcagttcatggaagctggaggaatgttatgagaccagcatggagcggtgggtctcagagtcctgatctgggatccaggagcattcctgtggcttctggatgactcctgccgtgcccacctccctctgcaccgtccatctggggcaggctctgttctgtagtctgttatgggagagactggatcctgtcctgccagccatctgggatggggaggtgattttgatccgcctccaccctcctccccagtgttttcttctgtttagaacactgttcagaactgtcccactccagggctgcctccaaaggcccacactcattcatgcccacttactctcagcctctgtccaggcactgggggaagggaaaggcagatgtcagtctggcaggtggaaaacaggagtgcgtggaggcgtgggggtggagcagctcccgcgagggcagaacaacagtggagtggttgggaacacagacttctggggcggacaggcccagtttccacgggtggctggggaattcggtgcaggtgacctcgcccctctggacctcagttttattagggctgccatcacaaagtaccacaccccggtagcctaaacaacagaaatttattatctcagagtttagggggccagaagtctgagatcaaggtctgggctcgggctgggttggttccttccgaggtctatcaagaagactttgtcctgtacccctccctcagctgctggtggtttgtgggcatttttggcattccgtggcctctgctgcagcaccctgatctctgccctcatcttcatgtggcattctccctgtgtgtgtccatgtggaagttcccccccaccctttttttttttttgagatggagtcttgctctgtcgcccaggctggagtgcagtggtgtgatctcggttcactgcaacctccgcctccctgggttcaagcagttcttctgcctcagcctcccgagtagctgggattacaggcgcccaccaccatgcctggttaatttttgtatttttagtagagacggagtttcaccatgttggccaggctgatcttgaactcctgacctcatgatccacctgccttgtgctcccaaagtgctgggattacaggcgtgagccaccgcacccggctggaaatttccccttcttataaggacactggtcatactggattaggggctcaccctacttgatcccaactttacttctgcaacaatcctatctccaaatgaggccacattctgaaacaccaaaggttaggacttcaacacgtgaattttagggggacacagttcaactcatgatggaaaaaaataggaatgataattacccatgtactagggttgttaaactttaaaaaaaaaagttatttatttatttagagactgggttatgtgactggctaatttttgtatttttggtagagatggggttttgccatgttgccaaggctagtctcaaactcccgagctcaagcgatccacccgcctcagcctcacaaagtgttgggattacgggagtgagccctggcgcccagccacttacgttattgattcatacaagtaaagcctttagctcagttcctgtcacatagtaagtgctcagtaaatgttagtttcattaatgggttctgatggcctcatctctttctttctttctttctttctttttttgagacagtgtctagctttgtctctaggctagagtgcagtggcgcgatctcagctcatgcaacctctgcctcccgggttcaagcgattctcctgcctcagcctcccgagtagcggggattacaggcacgcgctgccatgcccagcggatttttgtatttttgttagagacggggtttcaccatattggccaggagggtctcgatttcctgacctcaggtgatctgcccacctcggcctccaaagtgctgggattacaggcatgagccaccgcgcccggccggcctcatctcttaatgggacaattgcagtcctaattagctcactgcttctattcttgcctcctctattccatttctggttttcattccaaagccagaaatgaaatcatgtgatataccccatgtataaagccttcagtggtttcccatttctagcattcagggtctttgagtctcaggtaaaagaaaaccaaacccaaactgtccgaaggaaatggagataacatgatggaagtccagggataacctgctttaggtgcagcttgagccagagctcaaataatgttattactaatgctgggtttttctccttgatctcccaagttggttccagtctcaaattggttgtcctctgatagttatgattgcagcaactctggcctgacatcaggtctggtggaaaaagagagagtgagttctttttttcttgtggaactttctgcagaaattctgaagctcactgtgagttggcttgggtcatgtgtccagctgttaaccattgctatgaccagggaggggaaggtggtcgattggcttagttagacctgggtcaggtgtggaaccccattgacacatcatgtcctgaaagtggggatcatctggattgcaaatgaaaatagtgttctttttaggaacagagacaatggctgctagggggaaacaaatcagttactctctaatatgctccagtgcttaaaataactttcaaaaatcctgaccaggaatggtggcatatgcctgtagtttcagctactagggaggctgtggtgagaggatcacttgagctagctgttcaaggctgcggtgagccatgatcatgccactgcactccagcctgggcaataaagagagaccccatctctgttaaaaagaaaaaaagaaaagaaaaaaaccttataggccaggtgtggtggctcacgtctgtaatcccagcactttgggaggccaaggcgggcggatcacctgaggtcagggatttgagaccagcctgaccaacttggtgaaaccctgtttctactaaaaatacagaaattagctgggcatggtggcgggtgcctgtaatcccagctacttgggaggctgaggcatgagaattgcttcaacccgggaggtggaggttgcagtgagctgagattgtgccactgcactccagcctgggtgacagagttatactgtgtctaaaaaaaaaaataacacaaataaataaaaaacaaaaacaaaaatccttatcatggcttataaggtcccccgtgatgcagccgtgctggccttgcttactgcacaccagccagtctttcatattcatttctcaaatatgccacactttcctccggcctttgtgtgtgcccttccctatgcctgaaatgcttttcctgactgcttgtcttctagccttctcgttcttatccctcagatcttagcctaaatgtcaagtcctcaaagaggcccttctggactgtcctgaatgtaaactaggccgcttgttattcctgcttggcaaagcttcatagcagttatcataatatttaattacacgttatgtttgtctttacatgtttaatgcccgtcttcctcactgggctggctgtgagtcccaggaggtcaagcccagacctgttatttatttatttatttttgctttgcattgcatccccagtacatactaggtgtgcaaaacaaaacaaaaaacctttattaaatgaatgtggttgaaatagaattgttactcatttaaaattttggttagtttgtcattggactagagcagggaacaaagtctggccggaagtttttaaaaccctggcggtgaaatttcaaagtgaaaatgttactcgtaagttaaatgaattcatactgcagccatattttttcaggctggctggtattagtgatgcccaaagtgactttccttttggagtcttggggccagtggagatggtatatctcccaacaataaaaatttcaccacgttaagtggagtactacgattaacacacatttttaattagcctcttagtcatctcctatctgaagaggccaggacaggcattttaatacttggttattggactacctctaaggagctctcccatgctgcagataccgttctgaatctctgcagtttgtcaaggttcctgcagccggaagctgttttccaggccgctctcttctcactaaagccacagttctttcttcgcactaaagccatccgttcagcttctgtgcagagggaagaggtccctgaactggcatgactgcaaaggcggttgaaccctcctctcctgcaggatgtggagggcatggaggctgtgccgtggatgggtggtgcatctcagaagagttagcttcagcagtcattgggtaaagcaaacatgctagagagtcacaactaccttcacgttctaaagatgtcgggtattagtgaggtagaggtttggctgctgtaacagacccaggatagtagtggcttaaatgcgagggcagtttatttccctcctgtgaaacagtttgagagtgagcagcccaggcccctgccgtcttgttgctccctgttcctggggtgttgctttcatctgcatggtccagaatgattctccattattgccatgtgtgcagcctggcctgtggtggggaggatgtaagaggagaggttatacctcctctttttcaggcagttgtgtttttttttgagatataatttatgtgtgttaaaatttgcccttttttaaaaatttattcctcccccacctcccatgcttttttttgtttgtttgtttgtttgtttgttttttggagaatggggtctcactctgttgcccaggcaggtctcaaactcctgggttcaagtgatcctcctgtctctgcctccctaagtgctgggagtgcaggtgtgagccactgcacctggcatatttgcccttttaaaacatttgatggttttcagtgtattttccaggctctttaatcatcataacaatctatttgcagaacatgatcaccacctcaaaaagaaaccctgaacccattcccgcttccctgattctgccctgtgattttcccatcccttcagcccctggcaccactaatctttctgtctctatgtatttgcctgttctggacatttcatgtaattggaataatgcagtatccatttctgtctggcttctttcactgagtgtcatgttttttgttttttggggttttttttttgcagagacagagtcttgctctgttgcccaggctggagtacagtggcgcgatctcggctcactgctacttcgcttcccaggttcaagcagttctcctgccttagcctcctgagtacctgggattacaggcgtgtgacaccatgcccagctaattccttttgtattttattagagacggggtttcattgtgttgcccaggttggtctcgaactcctgagctcaggcaatccgcccgcctcagcctcccaaagtgctgggattacaggtgtgagccatcacgcccggcctgagtgtcatgtttttaaggttcacccatgttgtgcatgaatcagtacttcattcctttttgggttggataatattctgttgtacagatagaccacattttgcttatccaggcatcacctgatggacctttgggttgtttccacgttttagctattatgaataatgctataaacattcatatataagtttttgtgtaaagatatttttcagttctcttggatatctacatacttaagagtggagttactaagtcatgtggtaactatgtttagcttttttaggaataaggcagagatacctagtgtgtgtgtgtgtgtgtgtgtgtgtgtgtgtgtgtgtcatgggccctttgacatctttttctctcagttgtgtttttaagtttataaaatgtaggatgacaaaggaaactaattgtcttaaaatgtagtttttgaaatacgaagataaatttgtgatatagtgtggcaaaatccattggcagatctaactaccataattccaaagtaacaaagggcataagtgctattttgagacgtttgtaagaactgtgggctgggtgtggtggctcatgcctgtaatccctgtgctttgagaggctaaggtgggaggatcacttgaggccaggaatttgagaccagcttgggcagcatactgaagccccatctctacaaaaaatttaaaaacttagccgggcatggtggtgtgcacctgtagtcccagctacttgggagactgaggtgagaggatcccttgagcccaggattttgaggctgcagtgagctgtgattgtgccactgcattccagcctgagcaacatggggagaccctgcctcaacaaaataaaccaacaaaactgcaatgtgataatatacctgtggtttctgttggtgacaaatttgtaagcatgaaaactatagtttgcctatattcctaattgaagaaaatgctgaatttctgttagagattagtgaaaataaagaggtaattctgcccccttccccccaaattagtggagctcctgaattctatcctgcttcaaagagcatgacccagaagttgcacacatttccttcactccttccctgtgatcctgattagttacatggcgacagctagctgcaagggaggctgggaaatgtagtcctcattcaagtcaatcaggtgcctggctaaaatataggggttccgttattaaaggaaaggggggaggataggtattgggggacaagaagtcaatactgtactgcagtacacactgtgcagccactttctcacccaggtcagaacacgtgttcttctcataagcacctgccagaggagttagtttggctttggggaccatggtgtatgaaaaaaaagcgcatctttttttttttttttttttgagatagagtattgctctgtcacccaggctggagtgcagtggcgcaatcttggctcactgcaacctccgcttcctgggttcaggtgattctcctgcctcagtctcccaagtagcttgggttacaggcatctgccaccatgcccagctgattttttatattagtagagacggggtttcaccatattggccaggctggtctcgaactcccgacctcaggtgatccacccacctcggtctcccaaagtgctgggattacaggtgtgagccactgtgcctggccaaaaaaaaaaaaaaaaaaaagcgggaggggggcgcatcttgaagcactaaaacgcctctcagcactctgagagtgctgctcgcatgacgaagaactgaggctgcctgagggagtagcgtatgcctgtcccccatcccacactcacaccagagcaaatgcttaggaagtggaatgctgggtatctgttctgcttaaattatttgtcctttagtgaggggtaaggggatcctagttgaagttatgagaggtaaacatttgatacaacctctctgtgcctttttactgtgcagtaagatgtgtggtttggcttctcagatgactggatggtgatgctatattggaactcttgattctatgtgtcagactccaccctcgatcacccaaggcagaagagggattgatgtgttggcctggagtcccaggaagatcagcaacagagagtgggcagctcaggcctccggcagcaaattaacaggacatgggcagcccagaggcaaagtgacttccccattgtcctggttgtaaaggctgaagggtcatgatgctgatctaacattggtaacagctggactttattgagcacttcctgggtgcctggcagtatttgttttcatcaaccttatgagatgggtcctgccataccccactttcctgatgtgtagggactcatcgacctcctcaagatcatatagttacttatttgtggctgggcatgatggcttgcacctgtaatcccaacactttgggaggccgaggcaggaggattgcttgagccaggagttcaaggtcagcctaggcaacatggtgagatcccatctctacaaaaaaattagccaggtacagtggtacgtgcctatagtcccagctactcaggaggctgaggtgggaggatcacttgagcctgggaggttgaggctgcaacagcaagtcatgattgtgccactacactccagcctgaacaagagtgagaccgtgtctcaaaaaaaaaaaaaaaagtattgattcatggcagaggtggggtttgaacagagagtctggttctagccggtactgtcatgagggcagagggtgagatgcaggagcagaaggcttgacagcctggacagaggagtttgtgttttccttcatgctttcatttcgtgaatctttgttactgatgatgacttttgagttgacgtgattgtgccatcccagcctcccctccctctgttctaacacccagtggtacatccccttccccaacagcaccatcagacacacaggtggctcttgtggaatctctccattccccattattctaggccagcccttctcccttatcctagttttaaacatgaatttataaagggtagttaatttgtggccaggtgtggtggctcacgcctttaatcccagcactttgggaggctgaggcgggcagatcacgaggtcaggagatcaagaccatcctggctaacatggtgaaaccccacctctacaaaaaatgcaaaaaaaagtagttaatttgttactcagcaaatctctacggtgcctaccagactccagatctgggctgctggacacaggaacatcgttaagcaaatcccggccgtcgtggaactgacagcctggaggggacgcaagagacttgggcattcaacagataacttcagagtcccaactgcagctgtgatacataccaaacaggaaacagagagagagcgaggagagcatattaatgtgcggaacccagggcctgacccggggaccaggaaggaggatggcaaggagggcttcccgaggaggcaccgtgtaggccgagcctagagctgaatggtggcagagagggaacagagcacttccagggggaactggaaagccctagacacatcaccccagtcctcactcccactgaactctgaggagacggctgcaagtcgaggctccccacccaccagcacgtcacagtgtgtccaggctcagggtccccatctgtaagatgggagtgatattggtcatggtgcccatttcattggtggatgtcactggtggattaaatgagttactatatgtaaaactttagaacagctcctggcctgtggcaagggctctataggtttaattagtcattaaaattaaaatttgtatgttgtaggtctaaagatggctaataaaaaatcaccccacccaggccagaatccaagttagaggactgcttgacagggactgccagacacagacttggttgtgggagtcaggggtgcagcctctggctaccacccccaggaggcattcagaaatggggggttggccgggcgcagtggctcacgcctgtaatcccagcactttgggtggccgaggcgggtagatcacttgaggtcaggagttcaagaccagcctggccaacatggtgaaaccccatctctactaaaaatagaaaaattagtcatgcgtggtggcgggcgccagtaatctcagctacttgggaggctgaggcacgagaatcactcgaacccaggaggtggaaattgcagtgagctgagattgcaccagtgcactcctgcctgggtgacagagcaaggctctgtcttaaaaaaaaaaaaaagaaagaaaagaaatggggagttggtctcacaatgagtggtgggggccagggatgctgactgacctatgcacaggagtgttccaccaaacatgcccacggcgccccaggggagggttgtcctggaggggatttccttgggtcttcgtcttgttgtacgtctcttattgggtttctctccctggggtggaaagatggctgctcttggagatgcaggctgcccctgaatgccctgatcactgactccaacttgtaaaatatttgtaagatgcccccgcactgcagcactgggaagcagtgccggccagtctggcagaaagtgtgaaacccagtaagtgatctgctttatcaatccaggttcttgggttgcaagcaacagaaatcaactcaggcaccctgaggccctaaaagggtcgagcagctctggggtgtctctcagtggatattcttgggcacttttttagggccctgcattgaagagcttagacactgcagcccgcctcctgggtgagaatcccaacctcactccttattcataagcatctcaagctttctgtgcatcagtttgtcggctataagatgggaatgagaaccggagggttgctttgaggattcagtaagttgatatttgagacgtgtttagaacagtgtgtagtgtagagtatgtggctagatatatactagctgctattatttttattaagtgctgtggttattactattagtattatttttttgagatggggtctcactctgtcacctaggctagagttcagtggcacaaacacagctcactgcagcctcaacctcttgggttcaggtgatcctcccatctcagccgcctgagtagctgggactataggcatgtgccaccatccccggctaattttttgtatgtttttatagagacagggtcttgccatgttacccaggctggtcttgaactcctgggctcaagcagtccacccacctgagccttccaaaatgctgggagtacaggcatgagccacctcacccacctagcctaccattattatttttattttattaaaaaaaattttttttatgagatggaggcttgctctgtcgcccaggctggagtgcagtggtgtggtcttggcacactgcaacctccacctcctgggttcaggcgattcttctgcctcagcctcccaagtagctgggactacaggcacgcaccaccatgcccggctaatttttgtggttttagcagagacagggttttgccatgttagccaggctggtcttgaactcctgacctcaggtgatcctgaggtcctgccttggcctcccaaagtgctgggattacaggcatgggccacttcacccggcctcattattatttttattggcagcttgaaattgaaatccctgagcaagaggaagccattggcccagtttggatcaggtgggtgggcaggtcccatgattggcagtcccctccacgcccccccccacagaagtaggaggaacgagggagaaacagttgtccccaggaaaagtgggctgctgtcaccagaagttggggcagagactccaggctccaggcaggtccagagcgcccgtgtcctccatgctcagtaactggactcaacaaatgttggttacttccctgctttgtgccatggcctctgctgagcacagaagacacagaagggacagtgatttgcacggtctcctcctcacaggtcctgtagtccagaaattgagggtcctggttaaaactaaatgcctagaacagtgcctggcctttaggaggtccttcgtaaatgtttcctcaatgaataaacacacagggaagtgcaagagttttatggaacacacaacaaaagcatcccactagttattttaaagaaatccatgtttgtacctttagtctccaggatgaggttcagaggggtgtccatgcacacagtaggtgtttaataaatggggactaaattatctaataggtgcatggtcctgcagcctgtccggtgtgacagttgagggcagacccagagttggggagctggctgccttctctgttgaacaggatgtgcagacgtggctccaggatgcatctctgtggaatgcagtcgctaatacaaatgagcttcctcacgtcacaaggcatctattatgtggacagttgggcgatgggccgtgggactgggcgggctctctaggggagtttcagagccacagttatgtttagggccttcctttggagagggacttttccccatgaatgactcttaataacaaagataataatagccaccactttccaggtgcctgagctgtgcaaagggattaacccatggactcctcacaatggcccatgaagccagtatatgatccccattgtgctgaggctcagagagggaaaataacttgcctgttgtgtgcacagcaagtgagaaattgaggtgggattctggccatggtctcttgctccaaagcttgggtttgtccttctataccatgcacagcctgttttctctctctagtactaagtttaaaacaatattatttttattaatttgcatatagtacaatatttaaaaataaaaaggccaggcacggtggctcacacctataatcccaacactttgggaggctgaggcgggaggatcactggagtccaggagttccagactagcctggacaacatagtgagaccctgtctctacaaaaaatttaaaaattagctgggtacggtggctcagggctacagtcccagtcactcgggaggctgaggtgggaggatctgcttgagtccaggaggttgaggctgcagtgagctgtgatcgcaccactgcactccagcctgggtgacagagaccccgtctcaaaaacaaaaccagaaaaaaaggcagtttcccttccacacccaaacccttcacagaagcagccactgtgacctgtttctcacatctcctttcagaagtcatgagtacaagcaaatctataaacatggcagctgggctcaacattaagggtggccacctgtagcctgcgggcgagatccaactcactgcctgtttttgtatggccagggagctaaaaatgggttttacgtttttaaaaggttaaaaaaaagttaacactatttcatgccacgtaaacctatatgaaatttaggtttcgccaggcacagtggctcacgcctgtaatcccagcactttgggaggccgaggcaggtggatttcctgaggtcaggagtttgagaccagcctggccaacatggtgaaaccctatctctactaaaaaaaaaaaaatacaaaaattagctgggcgtgatggcacacacctgtaatcccagctactcaggaggctgaggcaggagaattgcttgagcccgggaggcggaggttgcagtgagccgagatcgtgccactgcactccagcctgggcaacagagcgagactctgtctcaaaaaaaaaaaaaaaaatttaggtttcactgtctataaatatttattggaacacggcccgcccatttggttgtgtattgtctgtggctgttcttacactgtaatggcagaattgagtggttgcaacagagacaagtgtgacccaccccccaaacctacaatatttgctctttggccctttacagaagaagtttgctgatccctgcactacacactttcctttagtaatgcgtgttagagacagttggctctcagcacttttcttgcgtgctaactgtgctccccaaaagcagagcccagctgcaagccgtgggcatgcccaggttcggctggcggtgggtctgttggtgcctccgcgtgcacactcactctgagcatttcttgggccctggctgcgtggcaggccgctggctgggagccagggcaggtctaggcctgccctcaggaatccacaggccggtgggtggggagagtcagacagtatcgggcagtcctgtggagggatgtattcaggcctgctctcacaggccttccttgaccctctccccatcactcccactttgtttttatttgtggcacttaaataaaaaataggtcatgcatttatatgcttcaaaatcaattctatgtggatgtgtgagcagtctctgtcctccactcctctccctgcccaccttgttccttctccccttacgtaatgatttgtattttcccttgggtatccgtctaaggtatcattatatcaatacaagcaaatatgaatatatatttttgtcttctccttccttcgacaaaaggtagcctactcagtactctgctctgcactttgcaaatgtttactgaacagtatgccctggagatcctcttattttagtgttctggtggaaactgaagggtgggtaggagttaataaggcaaaaaagaaaggtgtatcttagggtgggggaagcatgaggaagagcattctaggcagagggaacagtgtgaacagcatgcttccaggttccggggagcgtggctccctccagagcagggggaaggcctgggaggctgaggccagggaggagggggcccgtcgaggcatgaaggttcagcaaggcctgatggtcaatggaggaaccgtgcctttaattctgagctcacccgggtgtggggttctgctctgtttccttccatgccctgatttctctgtggccaagtacacttggccgtcattccatatgaccaaggagaggccaagaatgtcctcgagagagggttattggggctggttaatgatggaagaatttctcctgtgagctgcgctcaagaagtgtgacctggtgtctgggaggtttcaggcctgttcctcctgcctcctcagttctttctagtcatgagacacgggacacatcccatcagttctcatcttttcagtagacacagtcgtagtgccaaatacaggctttgtttggagggtaatgcatacaccgtgctcagttccaagttggccacatagtgagtgctcaagatgtgatagagatggctttggttctttttatagggctggtttgggctcatactttgttagtatagctcatgattaaaggtttggggattctgtgaagtgccttatgcctgtaatcccagcattttgggaggctgaagcggaaggattgcttgagaccaggagttcaagaccagcctggagaatacagcaagactcccacctctacaaaaaatgagccaggtggtggcacgtgactgtagtctcagctactcaggaggctgaagtgggaggatcacttgaacccaggaggtcaaggctgcagtgacctatgcttgtgccactgtactccagtctggcgacagagggagaccctgtctcaaaaaaaaaaaaaaaaaagagttttggtttgatcacctgagttctaatacctgctctgccacttcttgtccgtgttgagcaggttacttaacctctctgtacttgatttttgtcacttgcaaatgaaagtgataatacttgcctcttggtcccatagatgccggcaattattattattcctattatttcacagcctctgctgtacagtattgtcagatgacgcagtgccagtggtagcagcgtcgccatcatttcagcagcagtgcccttcgttagctgtaccacctcaccttttctgcaggacaccttcccgcaaatcctttcctgtcaaagggttagggtagagttgctccgtgagtatttaggaaaggaggccctggaagagaggattgtctctttagtccctttatgagtcattggccatagaaagttacatgaccacccataactgcagggaagggtgagagatggagaattttcctaatcgcctcccacacagaatataaatatcaccaccacagctgtgtgcagtacgtatttgtgagcacgttaatctatcttgccatcagagaggctggctccagcatcttacgcatgtccacgttgtggtcagtttgcaagaagtcacccgtgatatgtggcaaaacagccggactcccaacataaagtgctggaaggaagactgtgagggacacagttgtaaaggttctcgaattgtatctgtctgatcagagaaacaatttaatgtcccagatcaaagtcgagaggcaggctctgggaactgggctgtgagcagccagagaaaggcggcagaaccagtttcttcagggcaggtctcttttatctgcttgtctgattgcctggtggacactccattggctcccagaggccttcctggtcatctcctccctctggctgggtccttgatctttgcagatggctgcgtcccctggggccagggagcacctactgtgtgcctagtgctggccaaggtactggagataatcataggtaatgttcttccagcgttcaccatgtgcttggtgttgcggttacttgagtgaactcatgtaatcctcgcagtagccctatgaggtgggacagtgttaggtccattacagacatggagacaagcccagggctgctatgtcacttccccaaggtcacaaagctagttaggggcagcctctaccgtctggatcaaagcccgccatgtaaatggctccagcttttgcaggccacatgcacgtcttcagagctttctccataatggactcttttggaagaccctggcctccaagggctgtatagtggcttatggctctcccagttaatggtgcttatgaatgtggctgtggagggagagaggctggggctggacaacctgggctttcccggtgtgacctgtggcagccagaaagagggacggggtcaagcaggggcatctttgtccacccttagctcctcctggctattcaggacccaccttacaggttcctgtggcctccctgggttgtcttcctggggtcgagggttctctggcaggcataccatggtgcccttgcccctctaccccgacatcccagccaggccatgttgaaattgccttttcatttgttagttgatctatgcaaaatgttgggagggcaggggccttgcatctacttcccttggcccaatcctggctgtgcagtaggttttaaaaacacgtctgaacaaatgaataaataaatgactcatgtgatggaactaacatctaaacagaacttaacttgcagtatcttctgggcaaatgccacatctgggctagagaggcagtggagggtggtggttgaaagccgaccctggagccacgtgctgggagttgaaatccagttctgtcgcttacttgctgggtgacctcggacaagggactgcacctctcaggacctcagttttctcatctgttaagtgggataatagtaggacctgccccacggagcagttgtgaaggttacgtgagttgaaatgttaaagcatctggcacaggcactggcttaagagttagcagctgctcctaggcaccgtgcagtagcgttgaccatgaagagtaaccgagtcttagcctcaggtatgcggagagaccagctcagttccaggggagatgttgttcaccttgtgaacctaagaaacagtggtttcatccaaaaaagattgctcagacctggcatggtggctcacacctgtaatcccagcactcttgggaggctgaagtgggtggattgcctgagcttaggagttcgagaccatcctgggcaacatggtgaaaccccgtctgtacaaaaaacacaaaaattagctgggcgtggtggcatgcatctgaggtctcagctactcaggaggctgaggtgggaggataacttgagcctgggaagcagaggttgcagtgagccaagatcataccactgccctccagcctgggtgactgagcgagaccccatctcaaaaaaaaaaaaaaaaaaaaagattgctcagcactgatgaggaattgtaactgtaaccctgatcagtaagcttgcttcatacaggcatgattcgagtggagatttttggagttgcacgaaactatgtgttctttgtgggagaagttgggagaaagacccagcccggctgaatctcctgagaacaatgaggcactttttgcagatgcgctgtccttccagtctcagggagcgctgtgtgagccctgcgcagggcggggcagcgaggcggttaagggctggattccatccttactaatgtgtgaccttgggcaagtaacaccaagcacagtcaaagagaaaattagtaaatgaaattcactctgagtatagaatagagataaaatacatagaagtaacaaaacgggtggagtgagaagaagcatacatctagtaggatttccagaaataaagctagaaggagtggtggggaggcaatattagaactaatgctaaaaatgtgccataattgaagacttgcatctcaatgctgaaagctcacaacgagtgccaagcagagactggataaaaagaaatcccccagatagattattgtgaggctgcgaaacattaaggaaagagagaaaaccttggaaactagcagactaggctagggcaagtaacaaaccatctctaagcctcggtattcatttctgcaaagtgaggaaaagaactagttactatgtgaccagcttactaatgagcttggaactagtaaagatctttttgcataggtcctgacacatagcaagtgtgcattaaatgttagctgcgttactgttggtgtcataaacgttaatgacaacagtagtgattgttctgtaggctgctgtggaatatggctggtactccacagatgcctctcatgcaggcaactctgtagcaaactagagcatgtccttgtggtgatccctgaagaagagaatagtcatttcatgaacgtgactggaagtcaagatttgtggattccttcaacaaatatttctggggcctcttgtctgtgctaaacactgtttcaaggcccaggtatgcagcagagaagacagacctagtccttgctgtcctggagtacaaggtctggtggaggagacagactagaaataaacagtatttatcagaagtgattggtagtgctattaagacgttcaattattgtagcattttgggaggccaaggcaggaggatcagttgaggccagtttgagaccagcctgggcgacagagcaagattctatctcttaaaaaaattgtttttttctttttttttttttttgagtgtgggtctctctctggttgcccaggctggagtgcagtggtgcaatcttggctcactgcagcctcaacctctctagctcaagcaatcctcccacctcagcctcctgattgagactagagtcatgtgccaccatgcccagccaattttacgaagaaaattgttttagtcaagtgtgatggcacatgcctctagttccagctaccggggaggctgagacaggaggatcacttgaagccaggagttcaaaaccagcctagacaatagagagagagaaagaaaagaaaggaaaggaaggaaagaaactaaaccaggataaagtgaagtgagtggtagtggtgggaggggtgtcttagagggatgaggaaggggtctgtccgaggaggtgacatttaatctgagacttgaaagatgaaaaggagccagtcatgcacacaggtgggtgaacaagggtgagaatgtgttgggagggatttgtagtttgttccccaaagcctccatttgcttccatcctaggggtgtttggagaggatggctgtggggagctgactttggcgtctaggaagagaggtggtgggcccagaggccgggcccctccctggctcctcccagccttcccagggcccttacccagggatgcggggccacagggaagagacccttcgccccttgggtggactccctgacttcccagccaagaatgtggttgtcctttttgttccaaaggtgacccagctgcgccgtcatgcgagcaaagcggtggcgctttgtgcctgaagcccactttctccttccccagatagatcagctcaaagctgtctgccctagagaagctccagaaagcagccaagccagactgggcatgctgcttggggctgtgggggaattaaccatctcttttctttgtgtcaaaggtggggaaggtattaaagcaacagggcttcctggatagagccacagttaggagcccagattcagggcttaaactccggcttccccacttacaccttgggcaaatgccttccatgtgcctcaccttagctttcccatctgtagaatgggacagtaattcctgtgcttagaaaagtgcacacaggatgtgctacataagtgttatcaccttccaattttaactcgaggtgagatggctttctctttcctctagtttcttgtcaacagttaagacacttgcattcgacttctgtttctccacaccagcccggttcttgcccaggagcttggcgtctggcagtcagccaggcttcaggtgccaaaagcagcccctttgctggggaaaagcaggttatttgatgccaggaagctgagaattgtcaggatgtttgtcgccagcgttgggggcctgtgtggtgcctccacaaaagggactgctcttgcttgccagggagagaagactgcttcctccagggcagcttcttcttttcttaaccctggctgcacgaaccctattagaatcaggtgggcactgtttacaacgtgcccgtgcctgccttcccctttcccctcttcctgtgtaaagggcctgaggcctaggtgtggagacttttttttcttagctgcctgatgtgccttcagggacactctctgaattcaggggcattcacaatcactgaatgtagctgagaaccacctgggggtcgtgataaaatgcaggttctcattcatctggtctgaggaggagctgagcgttttcttttttctttttttgctttttgagatagagtctcactgtgtcacccaggctggagtgcagtggtgcgatctcggctcactgcaacctttgcctcccaggttcaagcaattcttgtgcctcaacctcccgagtagctgggattacagacttgtgccaccatgcctggctaattttcgaattttttgtagagatggggtttcaccatgttggccaggctggtctcaaactcccgacctcaggtgatccacccgcctcagcctcccaaagcactgggattatagatgtgagccaccgcgcccggacacatctgctttttcagtgagctcccaggtgatgtagatgatgctgtttcccggaccttaggtgtcagaatcaagggcctagaagtctgcttttcagatgtgtagaatctgggacacgcactttgaatccttagctgcatttttcccagaccccttggtgattgactacccattaggatttgggagcctagaccagggtttgtgaaccctgacgctgttgacctttggggctagatcactctttgatgtcagaattgtcctgtgcatattatgggctgttcagcagcatccctggcctctacccactagatgccagtaacagcaccccccagcggggatcatcaaaagtgtctccaaatgtcccctggaatagaggtggggcagtgttgtccctagttggttaccagcggcctcgcaccctctaatttcaccatgcctgggaccccctaggccagctggtcactcacatcgatgctcaggtcccacagtagcagtcatggccactttagtttggggcaggccccagtggggatacaagctcttggtgcatctcccgtctgctgcactttgacagccactgtcccggcgcctttactgctcagtaaatggtgggtgtggctggactagcaagtggggaaaggataataaacggagcttggtatttgtgttgggagagtgggaatcagaatgaagtcaccataaagtcccttttaataacagtagagaagattctaggcttggtggtattatctcctttggaaattgtcccaaattctctctctattctcccctcctcctacagtccccctgctggtcctgtctgtccttggctcccactggcctaaggcagcagtctctcattatcctgctggctcctgccctacctctcctggtctgtcctctgcactcagccaggtggggcctgtgaacacctgaggtcacggccctcccctgctcagaacctcccatgggatctggagtaccagcatctcactcaagagaaaagtcaaggccaggtgcagtggctcacgcctgtaatcccaacactttgggaggcttaggtgggaggattgctggaacccaggagttcgagaccagcctgggcaacatagaccctgtctctacaaaaaattttataatttttaaaaaattattatcaaaaagagaagcagggtgcagtggctcatgcctgtaatcccagcactttgggaggccgaggcgggtggatcacctgaggtcaggagtttgagaccagcctggccaacatggtgaaaccctgtctctagtaaaaatacagaaatgagccagacatggtggtgggcacctgtaatcctagctactcgggaggctgaggcaggagaatcgcttgaacccaggagacagaggttgtagtgagccgagatcacaccactgcactccagcctgggcgacagagcgggactccatctcaaaaataaataaataagtaatacataaataagaattaaaaagaggaaagtcagtgtcttttgtgtggcccactgggcccccttgatctggccctgtcacctctctgccttgtcctctgcttcctgccccattgctctttgaccctttccctgctcctagaacgcaccaggcacgttcgctctccaggatctctgcgcgggccgtcctccctcccactccacacagtcctctggctgctcctgcgaagcttcccttaggtttctctgctcagaagtcaccctcccagcgaggccttctttacaagcctgacctccaaacaaaaacagattcctctccccttctcatgcaatataagccctgttagagctggggccttgtctgctttcctgtggtttccccagcacggtgcctgccgtgtaggaggtgttggctgtgtgattgaggagggaatgagtgaactgctgcttaagtgcttctttgtgcctggccttgtgcatcctcccacggaaccttcctaactctgtggggcagctcctgttttttgtttgtttgtttgcttttaaagacaagatattgctctgtcacccaggctggagtgcagtagcacagtcatagctcactgcaacatccatttgctgaactcaaaccatcctcccacctcagcctcctgagtagctgagactacaggtgtgcgccatcactcctggctaatttttaaaaaatatttagtagagacggggatctcactgtgttgcccaggctggtcttgaactcctggcctcaagcagtcctcatgtcttggactcccaaagccctgggattacaggcataatctcagtgtaccactgcacccagctatgcagcacctatcttgagctccattttacaaatgaagacatggaggttctgattaagtcactgcccaaggtctccctctgaatagggaaatcctcagaacacacatcaggcctccctgcttaggatgaattcttttttttttttttttttgagatggagtctcgctctgtcacccaggctggagtgcaatggcgtgatctcagctcactgcaacctccgcctcctgggttcaagcgattctcctgcctcagcctccccagtaagtagctgggattgcagacgtgagccaccgtgcctggctaggatgaattctttaactccctacatcattgcactgcttgttgggtggcacagccagaatgagccttggcttcccgtgcactcagtcggggtgctggggcctggctgagccgggccattggagagtagaggatttggggttccctgctgtgcttgttgacgtagacccccccacctgaccttttgtttggccctcatgcatatttagggtttcacctggtggagtgggggaggggaggctccttctctggcgtttcctctgtgaaattctggagtggggtcagctcctgtttctgccctacggccgcatgcctcttctggttgctcaaccaccctggaagaattcccaggtcattttatacccacatcttgatttttgtaactgggtggaccagatcaccagctacctgggggtagggacagaggcatctttttgggtctcttttaggcctggcaaggtggtgggtgttcttgttaaaagatctaaaaacctccattcattcctatgtatctttttggggcctcttgcatgttgggcactaccttgagcctatgggaggaaagcagccagtgagacaggcggggtcgtggggtgaatacctgtggaactttggcggaagccaggtccgatgggatctggagtaccagctttgacttcagagcgctctcttctggctgggcatggagacaaggaatagatacagcaatagccacataactgcaggtggacgatgagtacagctcttgctcagctagtcagcccacagcgagaaccccgccccagtctgggctaacgtgtcctctgctgccagcagcccagtagggttctttgctggagtctggtttttccttgacttgtagctggcaagtgcttacacgctctcagaggcccagcagacatctctgtccactcaaggggcatgtgtgtgtttaattggaccactggtaccaacaacagcagacacgctcagtgccaggccgtattccgagtgctttttaatccccatgatgacttagtggcattggtactgttgttagcctttttttccagatggggaaagtgaggcaaagagaggggaggtaacttgtccactgcctgttaatagtaagtggcaggggccaggcacggtggctcacgcttgtaatcccaacactttgggaggctggggtgggcagattgcttgaggccaggagttcaagaccagcctggccaagatggtgaaaacctgcctctactaaaaatacaaaatcagcagggcgtagtggcacgtgtctgtaatcccagctacttgggaggctgaggcatgagaatcgcttgaacctgggaggcagaggttgctgtgagccgagattgcgccactgcactccagcctgggcaacagagcaagactctgtctcaaaaaagaaagaaagaaagaaagaaagtgcttattggccttttaaaaaaaatagtctcaaagctgggattgaacccaggccatctggcttccaattccatgctcttaagcgctctgtggacgtatcagatggctggacagggccaaaccggctgatctctctggggatgggaggaaggccctgccagcatggaaaggagcagacattcccattcctggtgctctgggaagaactacctccccacatccccagagcaaaggccatggaggaaaacctgaaggcaggaagaaagctatatggctggtcagctgctgtcaccctggaaagccctgggctggcttatgtaccccacctgcatgtgagttcagtgggcccattgtgcagacagcttggcagggaccgtgcagagtcactgttcccgggaatgcagcagctgagctctctgccctggagttccggaggctcctttcactcaagacagccctgtgacggtgatctgttgcacagatgaccctccacctgatgctttggagctggagacagatttctcttgggggcttgctaggaccggggtggggtttggggcatttggagttgggtgtgaggctgtggagccttgcagctgatggcttggagtcacactgcaggcagctgggttcgggccccaccctgcactagctgcatgacctggggcaggtacttcacctccttcctcaggctcttcatttttcaaatacctgcctcgttgactttgggctggagggagggataaaggatgataattcactgaggtcatcttatgcagagtgttcagtccacagacaggcatccacgtggctagaggcagggcctggggaaccaccacttccagctccagggctttaggcaagtggctttagcctccattgggctgcatttcctccttctacagcaagggccagagcagtcccaacctcttaaggctgcggggttcactgagtgagtaggtacctggggagtatttagcacaggccctggcactcaaggtaagtaagccccatggcatgagctgtcatgatcataatgcacaattaagaatgtcagcttgaggcctagcagtcaggcaaggaggaactgcacagataatatgatgaatagggccaggcatggtggctcacgcctgtaatcccagcactttgggaggccgatgcaggtggatcactcgaagtcaggagttcgagaccagcctggccaacacggcgagaccccgtctctattaaaaatacaaaaattttctgcacatggtggcacatgcatgtaatcccagctacatgggaggctgaggcacgagaatcacttgaacctgggaggtggaggttacagtgagctgagattgcgccactgtactccagcctgggcaacaaagtgacactctgtcttaaaaaaaaaaaaaaaaaattatgaatgggatggttctagaaaactccaagttggtcagctactcccctttggccttgaaaagtggtgacatgaggctccatgtggtttttgtgggcctgttttcctcctttcagaggagagtggcctttctggactgaagaacatgagctaaatggggacagcaaggaatctgggagtggaggtcctccagggctttgggaggctccattcaggtcgcctacgtgctggctctgtggtcagttgtgcagggcgagtgtgagtgcgggaagtcagcagacctgggtccctggtgctcccagctgcgtgaccccggcaggatcctcagactcgctgggtcagtgtcaggcacggtgctaagcacagaggtggtacccagtcaccgttggttgttctgaggacagcagaatagtgagggcaatggagggtgggccctatggtcagtcagctggattcaaaccctggctgtgtcaggtctgagttatgagaccttgaataagtgacttagccccctgcccctcagtttcttcatctgtgagatggggatgacacccacttcacatggggctgtggggatcacgagatgatctatatgaagcccttgaaccagctcttggcacagagaaagttctcattgtgcgttggctgtttttattgctattattattattattatttttgagatggagtttcactcttattgcccaggctggagtgcggtggcgcgatctcggctcactgcaacctccgcctcctgggttcaagcgattctcttgcctcagcctcccgagtagctggaattataggtgcacgccaccatgcccagctaattttttgtatttttagtagagacagcgtttcactgtgttggccaggctattattattaaaccatcctagaaagcatcataagtggaaagtgtaaatcgcagatacgttcaggggaacagatccctaacgggggaatctgtggagagctcctcctctggagggcttgttcagagctagcattcgagcctttgtgtttccagaacgtacctgaaaaagtgtgtgaaggaggggccaggagcgtgtcgaccaggtgtgatgttgtcttgccacggggacaggtttcccaaggtcagaggattccaccagattgttcaaggtgccgtatgaataaacacttgaagcattttaatagctgtacttttatttcaatgcatagcaggaaagtaatttcattttattttattatttttttttagagacgggtcttgctctgtcgcctaggctggagagcagtggcacaatcatagctcactgcagccaagaattcctgggctcaagcaatcctcctatttcagccttccaagaagctgggactataggtgtgcaccaccacacctggctaagtttcttatttttattttttatagagatgtgggtctcgctttgttgtccagactggtattgaacttctggcctcaagtgaccctaccaccttggcctcccaaagtgctgggattacaggcgtgagccatcatgcctggccgggaaaagaatttaaacagcatgtcaaacctagtatcccatggctatttctgcattgggtgaggctaaagttggtacttaagccaaaaataaaagtgagtatagttaaagtgtgaagtaagccgtagctcaggtgctctgggatatggtacaagtggcgccagtgtgtggagatctgggagacatggtgctaggagaaaggggtcagggctgggctgtgaagttgtttttcagcggtggaaaggctgaagctccctcaggaggttgctgagctgttcggccccctttgcctctctcctccttggctcttgaaaaccactgaaggtctgagcacagccactctagagtggagcagccgccctggctgctgtagtttcccacatcagaggtggtgggatggatgaggaaatataccaagtgtttatcgctagcgccttctcttcctgcagtgggatgtgagagctgtggaatggccttgagcagctacctgtgatagtggtaataatctttaaccaatgtgagtgagtgccaagcacttcccatgcttgatggcattgaaccctccctctaccatgtgatctttcgatctgtcagttgggacacactgggctgcaggtaacaagacgtctggtgactcctggctgagcagtagagacgccccattgcaaacatcctggaggagacaagctccatggctggtgcagaggtgctcacctggaactccaggcacttatgtttctgtgttcaaccctctgtgtgcaggcgtttcgttcgtgctggtggggttggtcattgtgtggtcatgggatggctgccccagcctgaggatcagatcctcagacacggcatcctgagctaggaggagaggagtaggggaaaggtttcctcttcacgtgcctttccgtttgaaagagaatatgttcttataaatacccctcctcccagcagacctctctttacattccattggccataaaggagccaggggccggccctagctgcaagggaggctggggcagcacatgtctgtaccgtgagagacagcaagagacaggggatggcagtggcatccgctagacaaccaagtgtctgctgtgggtgggtgctattaccacccttgctatagatgagagaaatcaaggatcagagaggtgagagaatggcttgcttggcatctcatacagcgtggagggacagagcagggatctgaagccatgtattcccacagagcctgcagttttaacccctgtgcagtgctaccttcctgagggggacacccagccggccataatgcagcgtggtgagtagatgagctgcaagtgcgggggaacacaggaaagagaaactcggcttgggcaccatcagggagaactgtgaagaggggtggttgggctggccttcgaaaggttagtaggagttctgccagatacacaggaaaatggcctgaggaggtggggcctgggcagagggcacagaatgaacaaaagcgggttgggacagtgtatgctgggtgggttaaggaagcctctttgggttgaaaggtgaatttgtcttatgtcactgggaagtctgtaggaggggagcttcagatgcagcccgagtatggggcccacacgtgccattggggctctccttggcttcgctctgccagcaggctggagtcgggcagatcctcctggtttatcaactcagtggaaagaggatttagagtcttcagtggtttgttttgttccgagacagggtctaggtctgtcacccaggctggggtgaagggcatgatcatagttcactgtaaccttgaactcctggcctcaagcagtcttcccacctcagcctccaaatagctaggagtacaggcatgcaccaccacacctggctgatttttaaatttttgggggatgtgtgtgtgtagagatggggtctcactacattgccagggctggtctcaaactcctggcctcaagtgatcctcctgccttggccaaccaaagtgttgggattataggcgtgagccagcacacccagccagtatttatttacttagagacagggtcttgctctgttacccaggctggagtgtagtggttcaatcagagctcactgcagcctcgacctcctggacacaaatgatccttcctcctcagcctcccgagtatctggatttacaggcgggagcccagcctttattgtttttaattgataagtaaacatcacatatatttatggtatacaacatgctgttttggtatgtgtgtacattgtagaatggctaagtcaagccatttaacataatgcattacctcacttgctttttttgtagtgagaacacttaaagtctactctctcagccattttgaagtatgccatgtattgttagtaattgttgctaccatgatgtacagtagctctcttgaacttatttctcttgtccaactgaagctttgtgtcctttgaccaacatctccacaatcctccactgccatcctctgtattttattttattttatttttttgagacagagtctcactctgttgcctaggctgtagtgcagtggtgccatctcagctcgctacaccctccaccttctgggttcaagcaattctccctgccttaacctcccaagtagctgggattacaggcacccactacgacgcccagctaatttttgtatttttagtagagacggggtttcaccatgttggccaggctggtctcgaactcctgacctcaggtgatccacccgtctcagcctcccaaagtgctgcgattacaggcgtgagccaccgtgcccggccaatcctcagtgtttttatactagccccagggaatattccatttgggttgtatgcctatccaagaaggtggtatttgggagtgggtgggggaagatgaggtagagatgctagatacacaacataatatccacaagtacatgtgcaacttttaatagataccttcgtcttctgtactttagtttccttgtctgaaaagtgggactaatacaatcttccctgcctcatacatagggtttgggaagattccacatggtaggcattcaccagtacagttagagaatgttctttgggccgggcacggtggctcacatctataatcccagcactttgggaggctgaagcaggcggatcacttgaggtcaggagttcgagaccagcctggccaacatggtgacacccgatctctactaaaaatacaaaaattagccaggcgtggtagcatatgcctgtagtctcagctactcgggaggctgaggcacgagaatcacttgaacccaggagatggaggttgcagtgagctgagattgtgccactgcactccagcctgggcaacagagtgagactgtctcattaaaaaaaaaaaaaaaaaaggccgggcacgttggctcatgcctgtaatcccagcacttcgggaggccgaggcaggtggatcacgaggtcaagagatcgagaccatcctggccaacatggtgaaaccccgtctctactaaaaatacaaaaattatctgggcgcagtggtgcgctcctgtagtccagctactccggaggctgaggcgggagaatcgcttgaacctgggaggcagaggttgcagtgagttgagattgtgccacttcactccagcctgacgacagagcgagactccatctcaaaaaaaaaaaaaaaaagaaaagaaaaagagagagagagagtgctctttggaacctagagcactggtctcccaattggtagaaggccccaaatggcaccttgccaggacctggtgttgccatttaaacttgggctgcttggattcaaatcccagccccagctggtaagagctagataaccttgggcaagtagctttacctctctgtgccttagtttccacatctgtaccagagagaagaatgcttagggcactgccaggcacatggtagacatcagtaaatattcttttgatgagtgcatgaatggaaaatctgagtcagaagcgactcacggcttgttaaacctttttggatttgtatcgcctagagtccctccagaaaagcattactctgttactgcaggctgagatgacccatttccctgttcctcagccagccctgtgtcttatcttctaggaaagaattcatagtaattttttccaggagtatgtggtaggacatagtaattttgattggtaatggaaccagcctaatattatggacatgtaagaaaatgtccatgtttttcagagctgcaaaccgaaacgcataaagttgaaatgacatgatatccggcatttgctttaaaatacttcaggccgggtgtggtgccacacatgtgtattcccggcactttgggagaccaaggtgggaggattgcttgagctcaggagttggagatcagcctgcgcaacatagcaagacctcatctctactaaaagtaaaaataaattaattaaccagacatggtgggatatgcctgtggtcctagctactcaggaggctgaggcaggaggatcacttgagcctgggaggttgaggctgcagtgagccaagatcacaccactgtagcagcctggaagacagagtgagaccctgtccaaaagtaaataaatacaataaaatactttggtaagaaggaaaaggggggaaaaggaagaaataaagaatagatgaagctaatatggcagaatcttgacaatttttgaatctaggtttgggtacaagggagttcattgtaccttactccctacttttttttagcatgttaacagaacaaaaaccagccctatctatcacacacacacacacacacacacacacacacacccacacacacacaaagactaaaaattgtgtgaccatgaaaagcactgcgatcctgctgcccacagacagttgggaaggtcctgagccagggtggcgatgggtaaatgaccaccttgcagttcttcgttcatcccctttgtgaggagaccttttctggttcagcaactggacagatagtggatttcaggccaaagcatcaatttctcatctctttcctgctgaggaggaggagaccaaaccccccagtgactgactcctgggatccctttcactgctgggcctggttttaccatggggtggagggagccacaagctgctcttctccagggacctgtgtgatgacggcaaaaacgtaactggccaatcttccacaatgactaaatattaactccagccccgctcctggacgcacatgagcagtcttgcccatccttgttaaacaggcaaccgccccagccttctctctagttgcacatggaagtgagtggtgggctgggttttccagcgctgaacgtgctcttcattccgctgcctgtggacgttagggaggggcttccgcagtccatctggcactgggtgggtctcagtccgggcgggcgatccacccaggaactgacccctggttgctccagaaaggtcatcgtttaagaatgtttcttgggtagcccagtgggagacccacgtgtgcgtgtggtcagctgtagcttccggctgtctcacttctgctgaattccagcaatttctcatttcctttaggaaacaggatgagtctggagaggagtatgaaaaatcatgacaaacctggcgatagggacactgggaacctagccctgaatgaagcttatagttggtcatgattgccagggtcttgaacagtgtggaccaggggaaagaaggtacctggggccagatgccctggattcaaatcccaccacccccactaacacttgtgaccttgagaaagttgcgtaacctctctgtgcctcagtttgctcatttgtaaaatgatgatagtacctgcctcgtaggatttaaggattaaattagatactgttttttaagtgtttgaaactgcctcttctgtagtagttcctcaattaatagtggctatgacagtattatcatatcctgttgtaatgggcatgcacagttaggattaagaacctttggtcagctaggtgtggtggctcacacctgtaatcccagcactttgggaggccgagacgggtggatcacctgaggtcaggagtttgacaccagcctggccaacatggtgaaaccctgtctctactaaaaattaaaaaaattagctgggcgtggtggtgggtgcctataatcccagctactctggaggctgaggcaggagaatcgcttgaacccaggaggcggaggtttcagtgagcctagatcacgctactgcattccagcctgggcaacagagtgcacagagtgagactctgtctcaaaaaaaaaaaaaaaaaaaaaagaacctcggtttataaatagtggttcagatggaagcagaaattagaggagaggaagagggaagcacttttctccccagcagtccatggtttgaggaaataggcttaatttcatcgttgaaaaatgttatttttcactcgatgttcaaaatctcctaggaaagcaggggcaaaagactttttttttttttttcctcctcatgcttggtcatgcaaaagactttaaagagagaaaatgtctcttccccacttctctatatacatgctgggaaaaaaaagactggaaggaaatgaaccaatgtcttaacagtggttgccctttggtggggagagaatgagtaactctataatcttctttgtacatttatgttccaagttttttatatatatatatatgttatatatatatatataacatatatataacatatatataacatatataacatataacacacatataacacatatataacatatataacacacatatatataacacatcaatcatatacacatatatatcacacacatatatcacacatatatcacacatatatatatatcacatatatatcacatatatatatactactttcataaacaggaaaaatgttaaaaagttaaggaatcatgtgagcttggcttctggggaggttgggtggagttacttcagaataaagctctctgcttaatgtttgagtgtccagagacgtttgcaccccacccttccttaaggtgtacttgaggcctattaaatttctacctagaaagttcttgatatcaaagatgatccctcaaactccattcttccgcctgcccagacttgttctagatatttatcttctctcccacctttctcttgagatgaaagaactctaattcttttgtggttcttctgatcttgcaaaagaaccacattttttaaaacttaaaaaaaaaattctgagacagggtcttgccctgttgcccaggctggagtgcagtgggaacaatcatagctcacttcagcctcagcctcttagctcaggtgatcctcttgcctcagcctcccaaatagctatgaccacaggcatgtgccaccatgcctggttaatggtttttattattcgtagagactgggtcttgctatgttgcccaggctggtctcaaattcctgggctcaaagcaatcctgccgccttggcctccccaagtgctgggatcacaggcatgagccaccgtgcctggccctgcagttttttagtacttttttattatgataaaatatgataaaatgtacataacacaaaattaaccatttaaaacttttattgtggcacaatatacataacaaattttttttatattttataattagctttagcttgattgtggtgattttgtcacaatgtatatgtatatacaagttgtccaccttaagtatgaacagtttttatttgtcagttatacctttaaggaaactgtaaaaaagaaaatatgcacaactcatttagtaacctagaagtcaagtgtttaattttctgaaattttattatgcccagttacattactgatagatatagttaccaaaaaaatgtaccttacgtgtgcagttcagtggcattcagtacatgcacatggttgtgcatccatcatcatccatccacagaacatttttcatcttgtaaactgaaactctgtctctgaaaaacaatattctccatccccaagaccccagtccctggaagccacctttctattttctgtctctatgagattgacgaatgtaagtgtctcctatgagtggaatcatccggtatttgtccttttgtggctggcatattttatttagtatcatgtctttaaggttcattcatgttgtatatatcagaatttccttcctttatgaggctaaataatattccaattcatatttaaggctaaataataatgatatgtatatatcacattttgtggccaggtgcggtggctcacacctgtaatcccagcactttgggagtctgaggcgggcggatcacaaggtcaacagattgagaccatcctggccaacatggtgaaaccctgtcggtactaaaaatacaaaaattagctgggagtggtggcgtgcgcctgtaatcccaggaggcaggagaatcgcttgaacctgggaggcggaggttgcagtgagctgagatcacgccactgcactccagcctggtgacagagcgagactccatctcaaaaaaaaaaaaaaaaaaaaaaaaaaatttatatgtatatatatatatctcacattttgcttatctatttatctgttgatggacacttgggatgcttctaccttttggctatagtgaataatgctgctgttaacactggtgtgctggcagggcacagtggctcatgcctgtaatcccagcactttgggagccaagacaggtggatcacttgaagccaggagttcgagaccagcctggccaatgtggtgaaacccgatctctactaaaaatacaaaaaaattagccaggcgtggtggcatgctgctgtagtctcagctactcgggaagctgaggcatgagaatggcttgaacccaggaggtggaggttgcagtgagccgagttcacacactccagcctgggcaacagagtgagattccatctcaaaagataaaataaaaataagactgaaaacaggagagtttattcagtaaacatcaactgaagaccctactctgggccaggcaccaatgagcaaggcaggcacagctcctccctggtggagcccacagccagggagaaaacacaagaaccgcagagccatatggataagtactgtgttctgcgtgctctgaagaagaatgggatttttcaagctgtagtacagggagattcacagaggctccccaaggaagtatagtttaagtgtcattttctgggtgcaaatggaaaacgtgaatttggtgtatgtctctagataagccccacttctgaatgattccggctgtgggcagggatccccagatgggcgttgctatggaagcagcttgcacctctcacttcctgacttgagtttatttccgagtttcccgtgccaccgccagttcccagctgtaaatacagacgtggcagggtccctttttcctgctgcctcgtagctgcccagagaacggatgtggctggaatccagcccaggagcctcctcccgagagagctcgttgtggaacctgccatgtggcggtttctcttccatcccgcctctttcctttgtcctctctcgggactgtgccagcgtgccccagcctgtgttttgaaactttagaccccagcttgtatttggtagagaaatgagctcatgagggcttcctccgccacccagcaaccgggaagttgagtcaaatctctttcatttcagatccatcccccacccccacccccaggccagatttgccacccttctgacagaaactgggttagctgttctctgggactgtttgtgaggaggggacttgttgacctgaacaaaggaactacaaacaagacaggggagggatgtggctgattgctcactgggattgggacttttcagctacccttcagtgctttcgaatagtaattgctaacgtgttgagaatttacagtgtgctagacagtctttaaatcacttttaatccatttaacagctcaatcaagtgtatataattatccccattctagagctggggaggcggtgggcaagttcggcaagttgagtcattggccaaattcctgtactgcagcaatttaggcaaaaagtgggcatttaaccagaggctcctggggcggcccagagacctgaagaaagcctcaggaccagtcagttacttggttgcaagtaacaaaaacaccaactcaaatagacataaattttaggggaaaggattggctcattcaactggaaagcccagaggtggggcagatgtctgggctggctggtccaggagcctggggctattgccagtgacccattttccttctgtctctttattgttccctctgatgtcagtgtcatcctcaaacgtggctcccctgaaagttgcacaccagctgccaggacccgctcaggcttgtgtccttatccctgtcctgaaagaaaaagaaggtatctgtcccgaactatcatgcaaaacctcagagctcctgtctgattggactagcactggtcatgtgatcttccccgaaccaatcactaataagaggggtgagctcacactagcaggctggttgcaaaacctgccatagaggaagggcgggctgggtgctgggattggaaccaggacacacatgccactgtatctgcattctcttcctcacttgttcactccccacctctagatctgcgttattcattctcttatattcagtctgtctttctgctttgtattctactggacaggaagcctggccatcacagactgctgagcaatacacgtttcagtacaggcccccagagagagtcaccgcatgttctctcagcccgagtccaaaacaacccgaggagtggaggatgtctccctccggactaaccggggccgaggaaagggttcttttgacaggctcagctgagtcagatgtcccccacccacccccggccaatcagctacaggcagggatgaagtcattgctccctctgtcccctgccacgtgcctactataacatcttcataggacctctaagctggaatcatttaagcaggatgccaaaggacagcaattgggccacacttcttgactgtagtgacactaaaacctcattgcaactctctacaggaaggccagctcttcagtgtggccccccagaccctgcttgctctggcccctgcctgccacccgcccccactcccgcctcatcctgcagatccctgtgcactgcgctccagctgctgggcctgccttccttgaatgcaccatgtcttcgccttgctcctgggctgctttcttggttctcccaccgtgctgcccactacccctgcccttctggcctggctgatgccgactcctccttcagatgtctccttcaacacactcccagggggttgctccgaagcccaccccgcccttcttccctgagctactcatctgacctgatcagggcttccccctccccttaatgtcagctccataaaggcaggaaccaaatctgttttgttaaaggtatgaccctttccaccaaatatgctccttactaaactttgctaagggaatgaatgaagtgataatagtgacataaggagaaagggaaagcggagcacagtgacttgcctgtcactcagctaggaatcctggcactgtgggaggctgaggtgggcagactgctgcaggccaggagttcgagaccagcctggacaacatgctgaaaccccatctctacaaacaatacaaaaattagctgggcattttagtgtgcacctgtggtcccagctacttgggaggctgaggggggaagattgcttaagcccccgaggttgagctatgatcccaccactgcactgcaagcctgggcgacagagtgagacgctgtctcaaagaaaaataaaagcacccagataaacaggcggtgaatggtggaggaaaaaactgggtgccaagacatcatgtaactagttggggaggtgatgctggggctgagagcatcagtcaaagtttgctggtctaggggagtggtggtggcaggggtgagtccagggtaggggttggggactgtatataaaaagagcctgaggtggggtagagccagtctcgaagaactgaaaggcccgaacctagaagcagcatgagtgaggtggggatggagcagtagaaggtgcaagaagcagacagggccaatcatgcttgaccttgcaggctttgcagggtgtggggcatcacgccttttaccttctagggagtggggcacgttaagagagggaagagggcaagaaaggtaggagggctttgaatattggcatgagaatactctccagggagatgacagtcccccacactgacatgggcagcatctgtagaaacaggaaatgcgtctcagacacatggaaagatacctgactctgggcgtaataagagaaatgccaattaaaatcatgccgagatactacttcgcacctctcagaagggcaagagcacaaggcgtgcgcacatgctgtgggcagtggtgcggggggcatccaggcttctccggagctagtgggagggaaagcagaactgtcgctttggaggggactctggccattcctgtgagtatgaccgggcacacacccacctttcaccccggcagctccacttctaggaagcttcacctacacatgttcccaagtgtgagaagtgatctttgtccaaggttattcattacagcagtgtttgtcagagcagaaaaggggaaatggcttgtgtgtgccttaataaggcactagaggaatcagtcgggtttgtctgtgcagcggaataccatgcggccgggaaggtagagtaaggccctgataagaggggccttccgtgtctgtggtgctgctaagcaggaaaacgaaaagaacgcgatggctcccgcctataaccccagcactttgggagaccaaggcagacggatcatttgaggtcaggagttcaagaccagcccggccaatgtggtgaaaccctgtctctactaaaagtacaaaaattggctgggcacggtggctgacgcctgtaatctcagcactttgggagaccaaggcagacggatcatttgaggtcaggagttcgagaccagcctggccaacatggtgaaaccctgtctctactaaaaatacaaaaattagccaggcgtgatggcacgcacctgtaatcccagctactctggaggctgaggcaggagaatggcgtgaacccgggaggcggaggttgcggtgagccgagatcacgccattgcactccagtgcagtgcaaaagtgaaactctgtctcaaaaaaaaaaaaaaagaaagaaaagaaaaaaacaaatattgtatttgtaattgcccgggggaggggggattttggaaaatgtgaggagaatataggttttgtgaagattccaatgccagtcagccctggagcactcttcattatttattattattattattattattaattcttcttctacctttttttgcttaacttaagcataccctgttagagcactcttaactgtcaaattagatcaccttcattttccataccaggcactgtgttcttggctacatgtgtgtaagtatcttggtgtgtgtgtgcatgtgtgtgcatgtatgatttagttactttattgagatctctgagacaccatctctgagcggccttcctcagcaccctgtctaaaatggccctccctgtcgctgtcttctgctttatttttcttcatggtgtttatcacggtctgatgttctatatttgctttctacaccatcctccttggaatgtgagctccgtgaaggcagggatctttgtctttgttcctttctgtatccccagcgtctagagcagtgcctggcccatagcagttgcttcatgagtgcatgttgaatgaatgtgagtgcgtctgaagactgaatgttatcctcctattgcagatgcggacctcaggcccccagaggccttgccctcttttcatggactctaagaaatgaagaacaaactgcaaagcccactggtgttctgactggggaagaggtgagaaatcaccataggctgcttttttttttttttttttttttttttttgagatggagtcttgctctgtctgccaggctggagtgcagtggtgcaatctcagcttactgcaacctctgcctcccgggttcaagcaattctcctgtctcagcctccctaatagctgggactacaggcacctgccaccatgcccagctaattttttgtatttttagtagagacacggtttcaccatattggtcaggctggtcttgaactcctgacctcaggtgatccacccacctcagcctcccaaagtgctgggattgcagacgtgagccaccgctcctggctaggctaccttttaagctgttaaaattctccctttacccccattccttttcctttcttttttttccccttagagacagaagtacaatgatgggatcatagctcgctgcagccttgaactcctgggcccaagaaatcctcctgcctcagcctcttgagtagctgtgactacaggtgcatgccaccaggcctagctaatttttaaaaattttttggtagagacagggtctccctatgttgcccaggctggtctcgaactcctggcctcaagcaatctccccagctcagcctctcaaagtgctgagattacaggcatgagccaccatgcctggccacattcctttttcaaagccaccttgagagctaggaatactagctgggtctcttctgctgggtcctgcctgtgaagcactgaggagcatgcctgcaccacaaaatttctccagctgtctggggtccatctctccttcttgcttgagcgacccttgttctggcctggtttttttttgttttcgtttgtttggttttgagaggagtcttgctctgtcacccaggctggagtacaatggcatgatctcggctcactgcaacctccgcctcccgggttcaagtgattctcctgcctcagtctcctgagtagctgggattacaggtgcctgccaccatgcccggctaatagagacggggtttcaccacgttggtcaggctggtctcgaactcctgaccttgtgatctacccgccttggcctcccgaagtgctaggattacagggatgagccaccgcgcccagccctattctgggctattattccatggagaataggtagagagagaaggaaatttccagtgtggaggcactctcctctggagggacccctcacttaggctgtgtgcttaatcttatcagagtccaatttgcccaagagacctcctcagacatgaggagtcgaggatgttgtttatttcttcagtatttccgttgtaataacatctttgccagtgtgcttttgagggtccttctgtgccagttacttttccaaccgttcaattgctgttacctcatttaaccctctcaacagccctattgagagtggatattactcctcccaccatgttactgatgaggaggcttgggattctgaatgggctggtaaccagccacacgtccacaggatgctaagccgcagacctgtgatttgattctggctctagctgaccaccaagatggcgctccctggcctcgttgccacactgcttccccatctgctttggggattttcccagtgaccaggaggacagggtctggttttctatgacggcgtgatatggatggttaatcatgtcgcaaagccctgctgtccagcatgaggctttggtgggttggaggaaggtgggtggagagcctgctgcttgtttctcacaggtgtttgccacacaagagatcaaacttctgtttcctgttgagattggtttccatctctctccattcatctctgacactccctatctctcttaattatgtcttatactgacgtctataaccctgctcagccctctccctccagaccccctcccagcagcaactgctgttagtagagctattaagaacacaggcctgtgatctcagcacttgaggaagccgaggcaggaggattgcttgagcccaggagtttgagaccagcctgggcaatataaggagactctgtctctactgaacataaaaattttttaaatgagctgggcatgttggctcacgcttataaccccagccctttaggaggctgaagtgggaggatcactgtagtccaggagtttgaggctatagtaagctaaaatcaagtcactgcactccaaccaaggtgacagagaacctgtctctcaaaattaaaaaaaaaaaaaaagggtctgggcacggtggctcactcttgtaatcccagcactttgggaggctgaggcaggtggatcacctgaggtcaggagttcaagaccagcctggccaacatggcgaaaccctgtctctactaaaaataacaaaattagctgggcgtggtggcaggcacctgtaatcccagcaactcgggaggctgaggcaggagaatcgcttgaacccaggaggtggaggttgcagtgagccgagatcgcaccattgcactccagcccgggcaacaagagcgaaactctgtctaaaaaacaaaacaaaacaaaaaagaatgtacacactctggagtcaggctgcctggatggagcctcacctctactgttacccactgtgtgaccttgagtaagtgactctgagcctcatgttctcccctgtaatataggggtaataataacacaaccttcttccaaggatggttgtgagtattcatcaagattgtgctgaacccagggtacaactcatggcaatgaccaacaaacagggtctctttctatgcacacagaaacgtctctccttacacagtttgtttctttattcactgagaagacatggatgtgcgcagatatatcttattttttcttagagctgctagaacatttatttagcagatactttcttgtgagtggcagcagtcttcaacagtctaggtatccattgtgaacaaggtgagagccctgtacccatagagttcatatattcatcagcaagacataataaagcaatcagtgggtcgggcctagtggctcacacctgtaatgccaacactttgggaggccgaggtgggaggatcgcttgagcccaggagttcaagactagcctgggcaacatggtgaaaccccctctctacaaaaaataacaaaaattaaccaggcatggtgatgtgcgcctgtagtcccagctacttgggaggctaaggtgggggaatcacttgagccccggaggtccaggctgcagtgagccatgattgcaccacttcactccagcccgaacagtggagtgagaccctgtcttgaaaaaagaaaaacagcagtcatgcttactgctctgtaagcaataaaagtagattgaagtaggggccccctgatctgggtggtcagggaagacctccctggggaagcctgccttgagaatagctagagccacacgtgcaaaggccccagggcaagcatgaaattggaaggtcaaggcagccagtgtggcgggagcatttgggtgatgggggaagatgatgaggcccaagatatgttgaagaactttaagctggaaagcagctggaggtgatccctgtttgatgtaatccttctggctgtgggtggagaatagaatgtaggaaggcaaaggtggcctggggaggccagagagggatctcatgaagttgttaggatgaaagatgatggtggtggcttggcctgggagggagaaagaaaggaaatgaattcaggatgtattttggaggtagtggcaacagagtttgctgatggccttgctgtggaggatgagggaaggagggacaggaaggattctcccatgtgtctgcatcattgctggatccctgctgacagacacacaggttgtctcctgtgtctcccaacatgcatgaatgcacatccttgctgggctgtgtctttttttttttttttgagacagggtcttgctctgtcacccaggctggagtgcagtgatgtgatctcggcttgctgcagcctcgaccttcccggctcctggctcaagcaccctcagcctcctggatagctgggaccacaggtgcatgcccccatgtccagctgatattttttttttggtagagatgggggtctcactatgttgcccaggctgatttcgaactcctgacctcaagcgttcctcccacctcagtgtcccaaagccctgggattacaggtgtgagctaccgtgagtcttaagggatgaagggcaagggcatttcaggtggagggaagcatctaagtaaaggctggggccctgttctggtgctgtacagggaacctcccctgctcccagcccagctcaggccagagtgtggggtgaggggcagaactgtctcctgggctgtggaacagcagcatccaacctcaatccactacccgaagcatgtggagttgctgcccattttgagattctttcatgtcctccatcccccgtcttctccagagctgctttctcatctggccaagtccattccccccaccccccatcctctctcctccccaggtgagtccagagtttcagctaatgttgcagcggcagatgcatcacattggatatcctgccattctcgggcccttgctgtctgcatttaggtcagctttgttttcctggggattgaaagcagtggctggtgtggcctttggttctgggccagcctcacaaggaggctggacctgcaggaagtaaacgagaggcctcttgtttgtatgaacttgattcttctaccatctttgtcccctgttcccttctgtgtcttgtttctggccttgttcttgagagtgcaggtcccacaggcagtggccagtgctgcaggcctcctttaccctttctgaggggctttgggcatctgggggactctagtccactcagccagtgagggcagcttggtcagtgtgagtttaaaacagcatgacctctgagctcccgttgcctcctgctccgagtttctctctggcgctgctagcaggtgctgggccaggccacttgtccaaattagcatctctgagagtttgccttctgcctacccaagggctgtagaataggtgtcacagattacaagaaggtaaaagttgacacatttcagctcgtaccaggtccaaaaagcaaagaacgacctgaaggagaaaaatatagaggattaatgagctcaactgagtaccctcccaagttgctggaggacatgtgaatcactgcagcctttttagagcatgggctgaaaaaaaaaagttttatgagccagtacatgcgtgtgataaaacattcaaatggtacaaagaaggtatacaatagtcttcttcccctacttacgatctcccagtcccctcctgtgaggacacccatgtcacacatgttcttccagagatgagatgctcaatacaaaaacaagcatgtattatatgtgcagttctgcaccttcacctggaaaccattccgaaatgtaaccatgtaatttttcataaacagcctttgacccagcactgcaactcctgagaatctaccatgcagaagaaaaaaacaaatagcctgagtagaaaaggatatttattgcagcattgtttgcagtggcaaaacaaaaaaccctggaaataaaacaaatgcccatttttcagggaatgattgaataaaatatggcacatctgtactcttggcctatcagctgctaagaagagtgggtaggagcactgcttgctggcctggaggcatttctgcgatgtatttaagggaaagcaagattcagagaagtaaatttgataagatcctgttgatgtaaaatacagcgacaaaagtcattgtcattttgttggggacagtgggtatctacttcattctcttccacgtcacatggcctgctcagcccggcattctgcctgggagaccttgccaggatccttacttgtggtcagagtaaacttcacccactggtcattattagaggcctgtctgcgagcatcctccacccagccacaggtggagagcccatggcattcgtgctggtaaatgctcacctgggcctctgtcaggctaggagagaccagcctgttcctgggtgccaggtgccatggtgagaatcacttctcactgaccatggcaggcaatctgactgatttcccagtcacttggtgggatgaactaagcggagtttggtgagccgtgaagcgtgcagcaccaccaaatctgccactcatgagaccagcacagaggaattacagaaatgttgaagtcaggacatcagatctcgggctgtgttccagctgaaggttctgggggcagaaagcacaggcaacaacttaattcacgtccaccccaagctcagcacacagagccacccgatggaatgcttctcacaccacattcttttttttttttttttttttttttaaataagagggtcttgctctgttgcctaggctggagtgcagtggtacaatcatagctcacttcagcttcaacctcctgggctcaagcgatcctcccccggctaatttttttttttttttgagacggagccttgctctgtcgcccaggctggagtgcagtggcgcaatctcggctcactgcaagctctgcctcccaggttcacgccattttcctgcctcagcctcccgagtagctgggactacaggtgcctgccaccacgcctggctaattttttgtatttgtagtagagacggggtttcactgtgttagccaggatggtctcgatctcctgacctcatgatccacccacctcggcctcccaaagtgctgggattacaggtgtgagccaccgtgcctggcagcccagctaatttttaaagatttttggttgagatatgatctgactgtgttgcccagtctggtctcaaaactcctggcctcaagtgatccttctgcctcagcctcccaaagtgctgggattacaggtgtgagccaccacgcccagctccatgccagatttaaatgcaagtatcagatcatttcactcattggaatcactaaatgacacagcctgcatttcctggcttatacgtatatatgtcattcattcttaccagaatagtggaaacgctgcacaaaaccaacttaaactgttttcatttcatattttggcatgtgcacattctaccaatattctacttttgacttactgatgacgaagcaatgatagggaaaggaactgtgggttaccgtatctttctcttgccttccatgtcattgttctgcatacctagttggctaattcagggaagtgtggcaagtaaaaaagaatgtggccaggtacggtgactcatgcctgtaattccagcactttgggaggctgaggcgggcagactgcttgaccccaggagtttgagaccagcctgggaaacatggcgaaactctgtcactacaaaatatacaaaaactagccagggatggtggtgtgcacctgtggtcccagctactcaggtagctgtggtgggaggaccacttgagcctgggaggtcaaggttgcagtgagctgtgatcaggtcacagctctccagcctgggtgacagagcaagatcctgttaaaaaaaaaaaaaaaaaaaaaaagaatgtgagaggtctccatggtcttcatgtttctttctgcatttcatgtttcattgccttctttctgctgtgttcgaagcaactcctggctctaatggaggggcctctggggactgtcagtgtccctgcttactcccttgtagttgtgataatatgcttactttatactttttgctttcaatcttgctgaacttgcatgcatcgttggtccgccggaatctgcgctcacaggggatcaggaatactgtatgaggatgccatgactaggagtgacaggcacacacgtggctcggatctcttctgctcacatgcatgctccattggccctggacttcacttacaaaatacaagttcaaagataaaatgatttagaatttcaagatggcaacagagcattagaccaagggaagggctcacagcttctggggtcacacactcataaagctagccccatctgggtttgttgcatgaagtaacaaatactcaattggagatagggttctgttaccaccccagttttaacttacctgacttggagtaatagcgtttcatgctaggacttaaaacacttctaaggccagctctatttttagtggactatatatacgaatcaaaacatagtcagtatccttacctgtgcctgtttttctgccatccactggtgggtagtggtccatattggcagatgacatcatcaactacccatttattcaaaccagaaacatacacacatataggtatacatactgtgaattcacgtcttcttttttgagatggagtctctgtcgctgaggctagagttcagtggcacggtctcggtgcactgcaacctctgcctcccagagtcaagcaattctcctgcctcagcctccccggtaactgggattacgggcacatgccaccacgctcagctaacttttgtatttttagtagagatggggtttcaccatgttggccaggctggtcttgaactcctgacctcaagtgatcctcctgccttgtcctcccaaagtgctgggaatacaggtgtgagccaccacacctggccttaaagtgattatcgatatatttggttaataccggtcatgtttgtaattgttttctgctccttaccagatacttctttttctgcctcctctggcttttttttttttttttttttttttttttgagactgagtctcactctgtcacccaggctggagtgcagtggcgtgatctcagctcactgcagcctccggctcccgggttcaagcaattctcccacctcagcctcctgagtagctgagattacaggggcacacgatcacacctggctaatttttccatttttgatagagacggggtttcaccatgttggccaggctggtcttgaactcctgacctcaggtcatccacctgcctcggcctcccaaagtgctgggattacaggtgtgagccaccttgcccaacttcgtgtctttattgaaaatacaaaaataggcccttcaaagaaatagagcagtgactttgtttattgaattcatgtaacaggcatttgcggaactgttcttgatattgtgtcttactcaatttgaatccagcagaaaatcagtttggaaaaaccgatgagaccctctgaaggtcattcttaaatcttccttttctaccacacacccatggccagtccaccagcaaggcctgtttgttcctgagcctaaacaaatcttcaccagagttctcctttccttccactgtcctcaccctgggccaccaccatatagcaacagctatctcctttttttttttttttttcttttgagacagagtcttgctctgctgcccaggctggaatgtggtggtgtcatcatagcttactgcagtctcgaactcctgggctcgagtgatcctccagccctcagcctcctgagtagctggactacaagcatgtgccacatgcctggctgattttttttatttttattttctgtagagacagggtcttgcagtgttgcccagtctggctttgaattcctgggctaaagcaatcctcccatcttgcctcccaaaatgctgggattacaggcataaaccaccatgcctggcctctctctgcttcttttgaacactgacaatctctgtgaaacagccagagggatctttcaaaactgtaaatcagaacatatcattcccctgcttcccatcacactaaaaagcatgtggctgactgcggccacacagcgcctcgagcaccagctatgtcttgaggcacaccctcccttgctgcagccatccagccacatgggctccctgcgtgtttctttgaacagactcatgtatccttctccatctcctgggattctctgattttttttttttcttagagaatttattaccaatctaatcattcagtctggatagccctttgagtgtcttttttttttttttttttttttttttaggcagagtcttgctctgtcacccaggctggagtgcagtggtatgatctcggctcatggtaacctccgactcccaggttcaagtgattctcatgctgcagcctgcagagtagctgggatcacaagcgcgcaccatcacgcctggcaaatttttgtatttttagtagagacggggtttcaccatgttggccaggctggtctcaaactcctgacctcaggtgatctgcccgcctcggctaggattacaggcgtgagccaccacacccagccacgaatttactttctatctctatgggttcgcccattctggacatttcatgtaaatggaactgtataatccatggtcttttgtgaccggctttcactcaacatcatgttttcatggcccatccatgtcacgcatggattcttgcttcattccttttatggctgaatattccattgtatggaggtaccacattttgttaattcttcagctaatggacattctgggttatccttactcccacttttcacatagcttccttctgctttttctttagttctgggcttaaattcattctggttctcaccactgaacttatatatgtacctgtttgcttacttctttactctggtcccctagtctggacggtacattttgtgagggcaggtacattttgttcaccgtacctagcatcctaccccacacagtgtccagagtgaggtagtgcccattattgaatgaatgactcaacatctcatatatttctcactttacctctccctaaggcaaagtgatcgtaaccccactctgtatctgggaagttctagctttctccctggtgttgaggagagcaaggcatcctaaagcatgaggatactttaaatagtggcaggttactagaaggatttctttggtgtaaaatactgtcccatcactcatctgctatgcaagactaccggctcatttgaaaagcccatttggctgccagtaacagacaccagaaataacagtggtgtaaactcagtggaaggcagtttctgtcctgagtaagacatccagagataggcagtccgtgcctggtgtggcagcttcacagtcatcaagaaaagcagagtgctttgatgcagggtccttctgctcaccatccctagcacagggcctttgtccttaaggtggcttcatggcccagtgtgactgctggagtcaagctagtgagtctggagtccaggtgggaatagggtgagggagaggcacaaaagcatagtccagctttgcgtttctgctgaggaattttcctcaaagtcccacagcttgtatttaccttgcattggccaggctggctgcaagggaggttgggaaatgtagtcttagctgagcatcctgagaaggaagagaagaatggctgctgggtgggcacttagcaactggagttgatacatttcctgcccacagtacccaggtccatcatagccagcttctgcccattggcctggaccttcaagccttaagtgaccagaatcagagcacggactttctgtgtgtgtctggttgaccagagggtgggattttgaggcttgtcaaggagcatcagttcaagaaacctaccatatcaccagctataagaataatggtagctctggccaggtgtggtggctcacacctgtaatctcagcattttgtgaggctgaggcaggaggattccctgaggtcacaagtttgagaccagcctgggccacttagcaagaccatatctgcacaaaacttttttaaaaagcattacccaggtgtggtgatgcacacctgtagtcccagctactcaggaggctgagacgagaggatcaactgagcccaggagttcaagactgcagtgagctatgactgcaccactgcactccaccctgggcaacagagtgagaccccgtctctctctctctatatataaataaatagaataatggtagctcacacttaatgcatacttagtgcataataagtcttgttctaaacaatttttgtggagtaatttttttacttaatcctcacaacacccttactattatccccattttggagatgaggaaactgaggcacagagagggtaagtcaccgtagactttctcactgttagtaattttttttttccgttcattcttccctttcaatgtgttatgaataagaggattacaaaataaagcctgacctattttggtagattgaccactgttctgtcttccatctgattagctggggtctggagagtgctttgtggaaaagcacccaacagtcgaaaccacattgacaggctgttttcataggcgttcaggaaggggcttaactgttggcacatccagcaaatggctggtgacaggaagaaaaaggatccacagctatgcaggatttccgcagcccctgagcctggggccagccgaccacagtgcctgtgtgccagtgggctgggcctggcctttaaaatgacagtcaccctggctgcccttagtagtgtgttaaggagaaagaagctattctctcttcaggtccccaagcattaattcgggcaccaggtcatctttctagctgcctctgatcagccatgctcagtggaaatctttgagtcccacaattcatctctgagttttttttgttttttttttgttttttgagatggagtctcactctgtcgcccaggctggagtgcagtggcactatcttggctcactgcaacctctgcctccaagcaattctcctgtctcagcctcccgagtagctgggactacaggcgtgtgccaccacacccagctaatttttgtatttttagtagagacagggtttcgccatgttggccaggctggtctcaaactcttgacctcaggtgatctgcctgcctcagcctcccaaagtgctgggattacaggcgtgagccaccgtgcccggcttttagctgagtctttctgagaccccttcaggtccatgttggtggctctctgcagactctccagggtggtggcacagcacgtggcccccggctgcagcaggtgtttcagttaggaatgattcagccgcagctagcagaattcacaagagacattgtcacctcaacacataggcggtcctttgtgtcatataacaatgtctggagagagaggctggcaggttcagtggctgacaggtcaacaccagcactgctctgaccctcttgccgccatggccttaagacagctgttggacccagagaactcagcccttctagtctgggcagggtagttctggggacaaggggactctctcaaatccagctatcacatctgcatatctgcattccaagctggagaaaaggcagactggtgaaggggaaaatgactgttagatgagtctgatccttttttttttttttggagacagaatcttgctctgtcacccaggctgcaatgcagtgatgcagtcatggctcactacagccttgatctcctgggctcaagtgatcttcctgcctcagcctcccaagtagctggggctacaggtgcacatctccatgcctgagtaatttttctatttttctttaatagagatggggtcttgctgtgttgcccaggctggtctctaactcctgggctcaagcaatctgcctgccttggcctcccaaagtactgggattacaggcgtgagccactgcaccccgcgtatgaatccagtcctttttgtgaggagaggggaaatgcttctctagaattcctgaatgagaaacctttgccctccccaaggttctgaagatacgcacctgtgctgtcttctagacatgttcatatttttcctttttcatttaggtctttgacccatctgacattgatgtctgtatatggaaggagacagagttcaaggctaagctcatactcttcactgttgcatttagtaggcaccattgttggtggttctagagccagacccgctgggttcaaatccctcctggctgtgccgtctacttgctgtgtgatcttgggcaaggtacctctctgtacttgagttttctggtctgttaaaaatggagatcatagtacaacctacttcacaggttattaagaggtttaaatggattggtagttaaagaacagaaaacagagccgggaatggtggcatgcaccagtagtcccagctactcgggaggctgaggcgggaggatcgcttgagctcaggaggtcgaggctgcagtgagctatgattgtgccactgcactccagcctgggtgacagagtgagaccctatctttaagaagaaaaactgtaatcccagcactttgggaggtcgaggcaggcagatcacgaagtcaggagattgagaccatcctggctaacatggtgaaaccccgtctctactaaaaatacacagacacacacaaaaaaatcgggcgtggtggcaggtgcctctagtcccagctactcgggaggctgaggcaggagaattgcctgaacctgggaggcggagcctgcagtgagccgagatggtgccactgcactccagcctgggtgacagagcgagactccatctcaagaaaaaaataaataaataaaaaagaaaaaacaaaacacaacagaaaacagtgcctggcatgtagtaaaatcacaacgaaaaccttgtgcttcaacccagaaagaatttgcacagccgcacatgggtctgggggctcagcagggagccctgggcctgtcagtaggtgaagtgaagtttgtcactgaggttaccctctcttcatctttacaagaagttgccagatagctctcccaaaatgtttgttcccatttccacccccacccgcagtgactgagtgttccccttactccacaacttcagcacatttggtgttgtcagcctggcatttcggccaatctgctgtgtgtggaatggccacacagcattttcttcccagagcagcttatctgcagaggtctgtctgtgagcccactctaccacggagttacttaggctgggctggaggcaggaccaccgtggggcccccagcacagtgaaatcctcatagctgtgtgttcagagcaccacactagcacgcctatcttctggagagggtgaggcggtggggccgggggtcagggggtacaggaaatgagaaagagaccctcaaagtcagtgacccaaccttagtcgtgtttgtagaccgcatcaatccgcaaaagaaccagcgctaaatcattattgtgtgctattaatagaatataggtcataagaggaaacatgattaattgcaagatgatctcagtggctgttgagggcctagattttcccaaggcaaagtcctttcctcacttatcagcttttctttgttgggatgtaggctagaggcagctgaatgaacagatatttccctaagtcattatttcaaagactggacagggatgggtataatgggaatcttctctaaatgaaggatgattgaaccactttattagtagttgagtaatccctgatgccacagtgatgctctggcggtctagaaaggagagcgaagcttacagcaaaggctgcagtgggtttggttcttccagaccagccacttacacagcggcacagaagagaaaggcctggctgtcccccatcaccactcagtcaagagagagtgcctgtggccaggccctcttagaggctgggtagacactgcccagggtgtttattctgctccaagacagaaacagaagagaacctcctgccgtcttgggacacagagaaaagagctggtaggcctgggcccagcaggctaataatctgcccacttggaagcagatgccagcaacagttgcaatctctggccggttagattggccagcccttcttccttggggagggggaggggggtggacgaggtaaaggggagtgaagaggtatgagcggatgatcctttccatgtgaattgaggtggaaatacgagggtggggtagaaaatcctggcccagaagtacaggtccaggaacaagaaagggcaggtgctccagccagccttgaggtcaggggagaagtgacctggccagcccagcagaaacagctcacctggagccatggtgataatgcctgcttcatagggtttcatgagggttgaaatcaaggtcattaacatgtaagtgttctgaaatgtcatatgaaagactggttttcagtatgttgattatggtcttgtggaacttttgacagacacttccttgtaggcctgttttataaagcaggaaaaaatggagctgccggaggtgagatgagggtgtggggcctggagcctcgcttgcagccttcctttaccctctgcagtctcctcggaggactgtactcaggggagttcaaggtgaaacctcctgggggtctcggggagcccggcactgccccccagctggccctgggccccagataagtcatttatgcattttggaccccagtttgcttttccaccaagtggacagacaagtcagactagatcaaagcattcttcacttagttcctacggacaggggcttcagaattctttgacatctttgagacaggcagtattttgtgctttttttcctggagggacatgacatagttttgtttcgtcagcttcttagaagggtcatgttcgcccaaacatgaaggagtgctgtattgattcctcaggtcccttcctgtgctgttagtttgttgtaagcgacagaacctccccaactcaaattgacttaaactgcaaagggaagttaatggttcagggacctgaaaaatcccagagctggcccagctggagtcagtactcaggtattctcatcaggaatttacccctctttatttccagactctgcctttctcaggtttaacttaattctcggccccttcctcctgccccacctctgctcaccctcaggtggcaaagaagtcctcagcagtccccctgccttaccacccatctgtttccgtcagaaattgcagcaaaatgtccagggcccactctgattggccgtgcttggctcacgtgtctctcccagagccaatccctatggctgaggggaggagacattcaggccaggacgcctttcccccttacattatctcatgggattctgttcttgctgtaaacctgcaggaagtgaagtgctcggcctgtatgtcacctgtgtgatgaatgggtcatggccatgagtgtgctgggattgtggaggcaaactgaaggtcatcgtcccttcccaggtggtagaaagtggggccctgggataagcagggtactggctggattcccggatctgtagccctcctttgctgccgtttccacggccctttggcatcttcctctctcctgcatgagggactgcagggcgacgggcatccgcagctccctctagtcggcaggaagtaggttcctggctgagagagacttggcaccacggcacatcgctgctgatcagcctttatagagccatatgcatcactttagagaaagaaaggagaaaaattagagtggcgggaaagcaatttccgttgcaatttaaaaggcggctattaaaattttataagagctttattgcaggggttttctgatcatcccaggaatttttaaaatgggaagtctagtgataaaggaaaatgttctgggtgcgtctggttccctcctgccctgccaagcatcttgaaaaccaccattgtgagggcttcctagaccagcttagcaatagcaacggcccaagaggccatttctgagtgttttaaaagcgtgtttttctgtatttgctgtttctatgtatagtgactgtttctaattttattttgtactttgctaaatggcctggtagggagctatgggaatcgtcaagaacagcagttgcctctgcccttctgtgttagttgagagtcatttggttgtatgaacaaatagaaattcaggtcaaaaggaagtctaaaaggaagtggatggacacagggcctgggagattcggcttggaatggtttcaggcaaggctggatccagggcctggtgaggttgtcaggacatgtttccttttacctcctggctcagcattcttctgtgctgattttattctcaggtaggctctgaagcagcccctagcagctccactagtagattcaaccaacttagcagctccaagggaaataaaccatctctttcccccatagtcccagtatatatcatggggctggtgtttactggctctgatcatcctggctttggtggcagggtcaccccgggccatctctgaagctgggaacagggaaggtggtgcagtggctttttggccagacttggatcatatgaccagtcccacctccacccacaacccatgggtggggtgagtcccataggactgagtgggaaagatgaggttcaaggggctgactgaggaagagaaatagatgcagggtgggtcaaagcaaccgacgcctggaaccccttcccatactaacttcacgaagctgaatctgcccccacactccccagttgttcttttcccttggaagctgctccgcctttaccttctttcgggtctcgttgaggggttcttaatctcgggtccatggacctttgaaggatggaagattagtgggtcacgaggttggctgggaaaaacattacatctctattttcgctaccctgtaactgaaattaacatttttttatgcacagggcaataaaccacaattggattagcaatatctgtgactttgtcactactagaaatcacggatattctcatatcacattacagtgttgcaaatatcacaaaatatcatttaaacacctacctgtttctaaatcactataggtattggactcaccactagatcttgtaatataacagcattaataggccagaagtggtgtttcacacctgtaatcccagcactttgggaggccaaggtgggcggatcgcttgaggccaggagtttgagaccagcccagacaacgtgacgaaaccccatctctactaaaaatacaaaaattacctggggtggtggtgtgtacctgtaaacccagctactcgggaggctgaggcagaattgcttgagtctgggaggcagaggttgcagtgagccaagatggcgccactgtactccagcctgggcagtagatcaagactccatctcaaaaaaaaagaaattattctgaggagtctgcaactaattcaccaggttgccagtaggagtccctggcatgagaaaggttaagaacccccttgggcttctccaggaaccccaggggaatgatcattgaagttgtcctgattcctggaccctggggtgttagctagctgcttgctaggcttccttcctgggagattcctggaggagctgaccggcctttgaggttggcggggatatttgggtagcatttggacattatggtattggggaagtggagcagggaggtgttgccagcccactgccttcattgaccattgtgacagagtgtggtctagccaggtggtcagaaacagactctgggaccaggttgctgggttcacatcctggctgtatatagtacactttttttttttttttaaacagggtcttgctatgttgcccaggctggtcttgaacttctgagctcaaatgatcctcccatcttagcctcctgagtagctgggactataggcttagtgggactatagaccactgtgcctagcttagtatacttttgactgactgggcaacctcagctagtgggtcccttatgaattctgtgcctcagtttcctcatctgtaacatgaaagtaataatagtatcttcttcttgggtgatcgggagagtgaaatgagtcagcacttgtctgctaggacagagccggcacattgggagggattgttattagtgaatggccattgcatataggacagctctagaccctctcagctctcatctcctgacttagtgcccagcctctgccggtgcccagaatgtgatgctgaacaatacagacagtgccttctccgcctggagacattcattcatccatggaatattcacttaaatataaacaagcatactaaatattcaaaggcataaattaataatataaagttccaaaccaggacaagtatgatttctctgtcattcctctgctcacagttgtctgaggaaatgtccttagaatagcccttcatctgtcccccctgccaccgcttgcccctcactcaccccgtgccagctccatgggcctcctgactgctcctgagatgctccacatctgctcctgccctctggaaggctctttcccaggtagtcacatgatctgtggtctcatgtattcacatctctgtcccctcgtccgggaggccttccccgagctctccgtttaaggtcacagtcccatcactatggcgtcaccccgctaggtttcatcaaggttccactctgtgactttgtattgtgtatttgtttattgtcctcctcccctactagaatgtctgctctctgaggacagctactttgtcttggagaaccctggttgtattcccggagcctggcacatagcaggtgttcagtaaatacttttttttttttttttttgagacagagtcttgctccatcacccaggctggagtgcagtggcacaatcttggctcattgcaacctccacctcccgggttcaagtgattctcctgcctcagcctcccaagtacctggcatgacaggcgcccaccaccacgcccggctaattttttgtatttttagtagagatggggttttgccatgttggccaggctggtcttgaactcctggcctcaagtgatccgcctgccttggcctcccatagtgctgggattacactcagccatgttcagtaaatacttgttgaaagagtgaatatgtgactgacagctgggtattactgcaggaaggcttaagttggccagagacctaacctcttctttttcctccatgtagatgcacagtctctgacatcagctctcctgggaccctccaagagcactagtgtctagaaggcactaagggtgagtaaggcgtggctgctggtttgcttagaattttacaactcatacacatattattttttttaaaattttaaaaaaagagtatcaagggaaaaatgaaagtttgcatcgctgtacttctgtcacccgcaagcctaacgtctaccccagaggtaattactgtcagtcactggctgggtgccctgccagaccttttcccatacacaaacattcctacatgcacatatacacacttattttggttcgttgtgtgagaaaaaggaaccaggctatgcagtgcttcttggcttgcttccaccatccccaataatagtatgttttgaagatctttgctcatgagcatacctcagcatatcatacatttcatatacttttattttttctttactttttaattcaatttttaaactttacatagagtaaaaccctcttttggtatatagttctttgttttgttttgagatggagtttcacttttgttgcccaggctggagtgcagtggcgtgatcttggctcaccgcaacctccgcctcccgggttcaagcgattctcctgcttcagcctccggagtagctgggattactaggcatgcgccaccatgactggctaattttgtatttttagtagaggtggggtttctccatgttggtcaggctggtttcgaactcccgacctcaggtgaactgcccacctcggcctcttttttttttttttttgagatggagtctcactctgtcacccaggctggagtgcagtggcgccatctcagctcactgcaacctccacctcccaggttcaagtgattctccggcctcagcctcccgaatagctgggattacaggcccctgacatcatgcccggctgatttttgtatttttgtagagatgaggtttcaccatgctggccaggctggtcttgaactcctgacctcaggtgatccatccgcctcagcctcccaaaatgctgggattacaggcatgaaccaccgcacctggccggtatacagttctttgaatggagacagatgtagacagttgtgaaactgccaccacgatcaagattcagagcagccccaccgccccactatgtgaatgtactggtttctctgttggttaaaaatatgagccaggtgtggtggctcacacctgtgatcccagcactttgagaggctgaggctcgaggatcgattgagcccaggtgctggagaccagcctgggcaacaaagtgagaccctgtctctacaaaaaatacaaaaattagctgggcgtggtgatgcacacttgtagttccagctacactggggctaaagtggagggtcacctgaaccggtggaggtcaaggctgctgtgagaccctgtctcaaaaaaacctaaaaatttaaataaataaataaatacatacatacatacacatgtatggcatgggtaatgggtatttacacatattttatatatatatatgtggcaaatatatatatatatatatatatatatatggcaaatacttacctgtgctatataggttttgaatatgttatgtttaggtttctgggttgggtttgggttggtttgctagtgaacattctctcttgtttctgtgggtgggttctaagcagtggcatgggcccccagctgcatgtcatttcagtttgcagtgacgccttcctggacgattcccagctttgttgggaggggccattgtctgatccttgaagaaccaagagaccataacggtgtgggaggtggaagggggaggattgtggcattcagaccctggatgcaggtagccgtgtcggccaagctgcgggaactgagtggctgtggatggagtttctctctcctggatgtttagtgggtctcatcacattccctcatcctggcagtcttgcctgggtacctgaagcttgtgtgtgggacagttgctaggggccagatttctgtcaaaggatgcttcctggcacaattcttgattacttttattttgaagtgattttagagttataaaaaagttgtgaaaatggttacaaagttcacatgtctaccctacatccagcttcccccatgttaccatcttatacaaccttaacacagtgatcaaaacaggaaattcacacaacccagtacgattaactcaatgacagacattaatcacatttcaccagtttttctgcggatgtccttttttcttccaagagtctattcttgatcccacattgcatttggttttcttgtctccttaacctcctccgatctggaacaattcctccgtctttcctagcctttcatgacccagacactttggaagaggactgctctgctattttgttgggtgtttcaacttgggtttttctgatgttttctcatgacctgattgaggttattcattatttggaacagtgccacacaggcagcatgcccttctcagtgcgtcattgtgggggtctgtgacatcaatgcatcatatttccggtaatgttcacctagatcacttggttaagttgctgtgtgccagatttctccacagtaaagttacacttttccctttgtaattaatggctatcttggggcactccaggccaggagtttgaaaccagcttgtgcaatgaagtgagaccctagctctaaaaaaataaaatagaaacaaattagccaggtgtggtggtgcacacctgtagtcccagctactcaggaggttgaggcaggaggatcgcttgagcccaggatgcggagattgcagtgagctgagatcgtgccactgcactccagtgtgggtgacagagcaagagcctgtctctttaaaacaaaacaaaaatgctacctttggggagaaactttgaggctatgctaatatcccacatcccgcttttcctcaaacttccacccactaattttaccatccattggtggccgggtcttgtctacagcagttactgctgtgctgtttccctgatggcagtttttgtgtgcctctcattccatctacatttattaattggaactcttctgtaaggaagacctgtcccttcccccttatttctttatttagttactaatttatatcctatgggctcatagatacttgttttaatctagcacattcctttttcatgtgataaaagctcccaagttccaagtaaattcctagcattgcctctcacacagcaggaagaacggcacttttcctacgtggtaaccagggccttagggaacttggaaagaacatgaacaggtttcgtttgttcattcatttattttccttcactcagcaaatatgcatttgagcacctactatctgcttctaggcactagggattcaggaatgaaaaaacaaactccttaccttaagggaacggacatcctactggagaataaaacagtaaacagataaaaagtgaatatagggctgggcatggtggctcacacctgtaatcccaacacctttgggaggccaaggtgggcgggtcacttgcggtcaggagttcaagaccagcctggccaacatggtggccgtctctactaaaccccgtctctactaaaaatacaaaaaaattagccaaccgtggtggcacacacctgtaatcctagctacttgagaggctgaggtgggaggatcgcttgaacccagaggcagaggtggcagtgagctgaggttgcgccactgcactccagcctgggcaacagagcgagactcggtctcaaaaaaaaaaaagaagtgaatataggataagttggatgtatatagtgtacataggatgtatataggagtatatagtgatgaataaagcagggaaggggactggcctcacagggcaattttcggacaaggtggccaaggaaggcctctctgaggaggccctgaatagaggagggagtgaggcggtccccagcctaattcatccacagccatccgggagatcacagtcaaatcatctcccttctgaacacagtttctgtgaaaaggaaatgtgttccctctccaaggggcagccctgctcagctggagccagtcttatccctgagtattgccagatctgatgttccccgcaatagaaaaggaaagtgaaaaattttttgccagtccattgaacccaaattatgcaacgtcagataatgaatgactgtgactatgttttgttttcattgtgtttattttttaagtttgcttttctttgtagcaaaagatagcaatttttcatttttagtggtgatatggattctttttaaatatataaagcttgaacatcacttgagggctgggtgcagtggctcactctataatcccagctctttgggaggtcaaggcaggagaatcacttgaggccaagagtttaagaccagcctgggcagcagagtgagactccatctctacaaaaaatgttttaaatagccaggcttggtggcatgcacctgtagtcccaggaactcggacggctatggcaggaggatcacttgcgcccaggaggtcgaggccatgctactgtactccagccccgggcaatagagcgagagagatacgtatgtgtgtgtgtgtgtgtgtgtgtgtgcgtgtatgtaaataattgtacagatggggagtagatacagctgaaaaggaagggtggaacacagcgactgggcttggtaagcactgtatggctcagccacccactgtttttcctctgggtcaggggttctcagcagcgggcctgagctgaaattggcaaacaattaccatgggtgtgcgccttgagccatttgcatcatggtatgtgcattcggccaggaatgtcttcaagtttcaggaacagaaacccccgctcactgcagcttgattgaatgagggcttatttctcgctcacaacagcacacctggaggtgcttggctgccagtgttagtttggtggctgggcagtgtcagggcagagccgctttgattctcttgatctttcccctcatggacacatcgctcctgctgccatgtcgcatagcctcccctagctccaaggaaggtggcaaatgttatttaacttttcagcctttcctgaggaggaagccagagaaaaaatgaattgagagtatctgttggggtggccagccagcactgcctggtttcatggggaaggaaaagcagtaataatgaacattaatgggtgctgactctgtgccaagccctgccgtaagcgcctcacgtgcatgatctcattcagttcttgtaactaccctaagacgtcactgctgtgatatccccatggtaatgatgaggaaactgaggcacgagtggtgaagctgcctgccaggtagaggagctgggacagggaggcatgcagcctgggtccagggcccctgttcttagccactacactttgttgcctcataagaggtccgggggtgcggggggtggggtacaggggaccaggctgctcactgtctggcctgggtttaaattcttccagcaagggcagagcccagcagtgtgttttgctttggggaagttgtgatcattaaaaaactgtcttgtgaatcacatccgcccctgtgtaactaactacctcccactggttcaggtctagtcctcgggagagcaccagctgcacgtcttattcctggcagccctgcagggacttacaagtggctgagggaacccctcttggcctccctttttccaaactatacctgtgcttttagttattcttcccaggatgagccttctagccttttctttctctggaggtctgctggttgattgcgcacacatttgatatgcgcctcccctgcccgtccctgtagagtagtggggatgcagtggtgactggaccagcctcatggctgggtggctctgccctcatgcggctccccatccggtgagggaagcagaccttcagaccccagagtggtcaggtctgtgatcggggaagcccaggggagtgggaacccagtggaggtgcctaacccagcctaggggtcaaagagggctcctggaagcagcttttgggctttggaggtggaatagagattcatcaaggagccgtttctaccatcttctccacctgcctttcttcagtgaaactctcacgacagctctcctttctgaacttctgtttccctcctcagtaaaatgaaagattcagacttgggtctccatccatccttccaaccaaccatcattgattgggcacctcccatgttcctgctcctcttgctgggcacgaggcttaccctggtatacagtatgttgggaagttctgcaggtaaacaacccagagtgataagagttctaataggggaagccacggggctgtgggaaccccaagaaggcacctaacggtgacttggagtttggggacaggcttctccagggagatgaaagcaaaaatgggttgacacggtggccaagagcacagctttccggaatccagctgacctggggtctagtcatagctgagcccgtgactagccctaaatgggcagcttaactgtgggtgcttccattttctcccaaggtggttgtaaggattaagatgggattatgaatttcaagtacctaggacagtacctggcacgagaagtcgcataatagatgataatgagatgatgatgatgagatgatggtggtggcggtggtggaggtggtgatgatgataatgaggaggaggaggatggtggcagcttgcattcattagcccttactgcatgttggaggttaggtggcttagtaacagcctataagataataagcgtgagctgctgctgttgtgattattcattcaccagacatgtgaggggtcgccctgcacccagccctgagctggcacaggcctaggtgtagcaggactgtgttctgggagcagagttcatacagcgaaagcctgggccaggaatttcatgggccaagttgggagtttctttggtgtgtgttggagacccatggctcctggcctcctggtcccctttcttgttcattcctgagacttttcagcactggcctcaagagtgtaggctgcccttgacctctgtggccagaacgcatggatgctctgctcagcccatcagccaagccccaaattagacctgacagtgtgatttattctctgggatggagccgggagggcacagccccagtgggtgattcggagggaaggttgtcagcccgaattagcccagacctttcatgcagccttgctggttcagcttcctctggctaagagggttttccagggtgttgctggcttcagcactgcctccttccccgtccccagggacggacacttggctgtgatccctaaggagcgtgtgtcccgagggctgcccaggcaggccctgtctgaaggcagtggaggctttgggtcatttcatctgccccctcaggagcacagagtcgcagctccgtggagtgcttggcccattccccgcttctgttctttcactgagttccgtgctgggtggctggtggccgtttccctgctccacaccttccggtcggtgatcacagtgtctctgctttctagctgccttcattcattcacaggaatgcctctgatgggcgagtttctgctgcagtaacaaattaaccctgaaatcctagaggttggacacaacagatgtccatttcttacttgtgacatgggcaggtcaggtgggagggcttaaccttgtacctcagggacccaggctgacaggagctccccccactcgccccatcccggcctgcccctgtcttggagcctcacaggctgcagagacaccacagcagaaggggacggagaggtgcacagcagcacttagatgccgaggcccagaagccacgtgttcacttccacctgcacccagaactgtcacacggtcctgcctaactacaagggactagaaatacgatactcagtgagcagtaactctcatagccacagtggactggtggggtatttatgcagcacctactgtgtgccaggccttctcagggctctagaaatgcagaggtgtccccctgccttcctggagctcatagtttagtggtggaaacagaattgaagtaattacagcaacagctgtgtgattatgtctgcactaagtgctctggcagaggagcccagagggccgtgacagcatatctgagagcccggacatgtcttgagaggtcagggaacgtctgtcataaggactgacgtttgggaggaggcctgaaggataagtagaccttcccccagtgggggcgaggaatggggagagagtccctggtagagggaaccgcatcagcagagctccggacgtgggaaggagcttgactctgcgaaggaactggaagaagacctgtgtaactgcagggtcaagagctgggagaggtaggtgggggcagatggtgccgggtctggctggcggtgaggaggaggctgggacttggaacacctgccttttggagctgttgaaagaatcaaatgagctcagtcattctcttaacaaatgctgagttcccactctttggcagggggtgttccagcagtgaacaagacgacaaatatccctgttctcagagctggcattcgaggagcgggacacaggcagtgaaccaggcagatacataggataatttttacctggtgaaaaaaactgctgaccagtaaatagagtaaaacaataaggagcgtatggattggaggcttttggctccaggtaacggcaacccccattcatgcagacttaagcagtcaggccccccacctccaagtctgagggttctttggaccctgtgagctggtgacacagcagctcaacaatagcctgggggactgtctgtcacggtgccttcatcttaaagcaggcaccttccatggtcagaggatggcaggtagggatgccctgggcagtgtcagggcaggtagcgggagatttttcaaactctgcatgtcccaaggatctgccactagcgtgccttggtgacagtgaattatagaagccagtgtgagagtaaggaggaagctgttgctctagtctaggctggagatgccagaggatggggccagggtaaggagcatggagggagaggagggggcaggttctgggtacggtttggaggtagagtggacaggacttgctaatggcatggctgctggaaaggagttctgagcagacacacacagatgtccactgtgcactgtatcttcctcatgtaaaagtcatgtgcaggccagacgaggtggctcattcctgtaatcccagcactttgggaggcccaggtgagcagatcacctgtcaggagttcgagaccagcctggccagcatggtgaaaccccatctctactaaaaatacaaaaattagccaggcatggtggtgggcgcctgtaatcccagctgctcaggaggctgaggcagggagaattgcttgaactcaggaggcagaggttgcagtgagccaagatcacgtcactgcactgtagcctgggtgacagcgagactccgtctcaaaaaaaaaaaaaaaaaagtcatgtgcatgttacagtctgagaaatcctacaggaaagaaacccgcttctttgactatggagcacttttctttttgaaagacacccaggaacatcttctacagtgtaatttggaaaatgtttaataatgattcccatccttgctgtacattagaattatgttggcaactttaagaaatcccaaggcctgggtctcacccttgaccaattcagttagagttactgagcgacattataaagctgtattatttgtttgcatttctttaattttttaattttaatttttattttttggagacacagtctcactttgtcgcccaggctggagtgcagtggcacaatcttggctcaccacaacctccgcctccgaggttcaagcaattcttatacctcagcctcctgagtagctggaccacaggcgtgcaccaccacgcctggctaattttttgtattttagtagagacaagctttcaccatgttgcccagggtggtctcgaactcctgagctcagacaatccacctgccttggcctcccaaagtgctaggattacaggcatgagccaccttgcctagcctgcatttctgattatcaaagtaatgcttgtttgttgtttaaaaaaagaaatcaaaggacccataatgccccaagataatcacttttatgagctggtgtgtgtcttccagatttttttcaacacttgtacctaaaaaatgccatacgtgccccaaaacaaagtggttcgatagctttccaaagagatgaaaaaaagtttgccagcggggggtgggggtggtgggggtgggggtcgggcatggtggctcacgcctgtaatcccagcaatttgggaggctgaggcgggtgaatcacttgaggccagaagttcgagaccagcctggccagcatggtgaaaccccatctctactaaaaatacaaaaattagcctgacgtggtggcacgcgcatgtaatcccagctactcaggaggctgaggcaggagaattgcttgaaccggggaggcagaggttgcagtgagccaagattgcaccactctactccagcctgggcaacagagcaagactctgtctcaaaaaaaaaaaaaaaaaaaaaaagtttggaggcccacctgaaacattcagggatttgaacaacataatcagctgcctttctgtatttcctaattgattaattttgtgacatgtttggaatccagatatcaaaaatgttgaattcagcagggtacagtggctcacgcctgtaatcctgtccctttgggaagcataggaggatcgcctgaggccaggagtttgagaccagccagggcaacatagcaagaccgcatctctacaaagaaaaaaaatagccaagtgtggtggtgtgtgcctgtggtcgcagctacttgggaggctgaggtgggaggatcgcttgagcctaggaggtagaggctgcagtgagtcataattgtaacactgcactgcagcctgggtagcagagggagaccctgtctcaaggaaaaaagagaaaattggactcaaaatgttccgtatatcctctcacatgtcataaaacagtgttagtcacacttttcacagacatccttattacaagagtcactttttgagtcatctacacgtatttccagagtacgctgtctccacgtccatctgaagcatttgtgatgtggcaccccttgaatttgtgtatgttgtcactggaaactgtatcccaacactcaggaagccattcctctaccattagacagtttttttttttaatgccccttttaggaattggtgatctctacagccactcactgttaggtttttttaaaaaaccaactcagatgtttaaggacagttactgaacatgggtaagtggctgagtaaacgtgaacatataaaagtggttatataatcgcctgtttgtgagtcaatcagactcatcattccagtgcgaataataaatgacaacttaggaaaatttctccatgttctttcttcccccacagtggcactttgctttgagacagttttcagtgctatattacacatcctttttttaaaaaaaattcaaaattctagttgaaatgccccatttaagagtttcaactgaagtattttgtttaaattggttaaacgtgtcttaaaatcatttgtccctatcttgctttttttgagtcggagtctcgctcagtcgcccaggctggagtgcagtggctcaatctccgctcactgcaagctccgcctcctgggttcacgccattctcctgtctcagcctcccaagtagctgggactacaggcgcccaccaccacgcccagctaatttttttgaatttttttagtagagacggggtttcaccgtgttagccaggatggtctcgatctcctgacctcatgatctgcccacctctgcctcccaaagtgctaggattacaggcgtgagccaccgtgtccggcccctatcgtgctttttaaaggaacctttatttattttattattattactttttttttttttttgagttggagtctcactctgtcacccaggctagactgcagtagctcgattttgtctcattgcaacctccatctccaaagttcaagcaattctcctgcctcagcctcctcagtagctgggattacaggcacccgccaacacgctcagctaattttttttttttttttttttttggagatggagtctcactctgtcacctaggctggagtgctatgtcatgatctgagctcactgcaacctccgcctcccgggttcaagcgattctcctgcctcagcctccagagtagctgggattacaggcgcacgctaccatgcccagctaatttttgtatttttagtagagatgtggtttcaccatgtcggccaggctgatctcaaactcctgacctcgtgatccgcctgcctcagcctcccaaagtgctgggattacaggcgtgagccaccgcaccaggccccagctaatttttgtatttttgttttgttttgtttttagtagagacggggttttgctatgttgaccaggctaccaggctggtctcgaactcctaacctcaagtgatccacctgcctcagcctcccaagtagctgagactacagccacaagccatcacggccagctaagttttaaattttttatagagacaggtctcactatgttgcccaggctggtctcaaactctagtctcaagtgatcctcctgtctcagcctcccaaagtgctgggattacaggtgtaagccaccacacctggccctttgctaatttcttacttggttatttttttctaatattgagttgtaagagttctccataaattttgaatattaatcctttgtcagatatgtggtttgcaaatattgtttcccagtccataggttgactttttgttatgtcgattgtttcctttgctgtgcagaagctttttagttcgatgtagtcccgtttatttatttttgcttttgtagcctgagcttttggtgtgatgtctaaaaaatcattgccaaagccaatgttgaggagctttccgccatgttcttttctgggagttttatggtttcaaatcttacatttaggtcttttatcctctttgagtttatttttgtgtatggtataagatttcattctttgaaaggctcagtttcattcttatttcccacttatgtttggatttatttctgggctattttattctgtttttatgtcagcaccatactgttctgattactatagctttgtaatataattttaaatcaggaagtgtgatgcctccaactttttatttcgcagtgttgctttggctagttggggtttttttgtggctatatataaattttaagattgcttaaagagcatgtttacagtgacttatcacacttggaattgtgaatacttgggaatacttaacaagtctcctatagtatatgcctccctttttattattgcccaaactagcatcatttaagtttttaaaagctaatatgtctttcccaaagagcacttgttccaaaataaaataaagtgaaagaccctgaaatatagctacattttctaaggataatattttgggcatatcttgctttatctttggttacatcttttatccaaaataaatgaagttaaccactcacaaatagctagctcagtagtgtttgaccttcctgcgtgagctgtaactagttctctcacatccccagcttgacctcattcattcattcattcgacattgatatatttcctgtcagctaccctgaaagccagtagtaaagatggcctttggaatgtgttggaatctcagccatccccttctacctctatgaccatggccaaagcacttaccttcctgtgcctcagtttctccatctgtaaaacagaagagataatgctgcctacatcataatatggttgtgggcattcaaggatttaaaacagatccatgggccaggcacggtggctcacacctgtaatcccagcagtttggggggccgaggcgggcagatcacttgaggtcaggagttcgagaccagcctggccaacatggtgaaaccccatctctactaaaaatacaaaaattagccaggcatggtggtgcatacctgtaatcccagctactggggaggctgaggcaggagaatcgcttgaacctgggaggcggaggttgcagtgagctgagatcacaccactgcactccagcctgggcgacagagcgagacttcatctcaaaataaataaatagttagatggaaagaaagagaaagaaagaaatagagaaaaagcgagagaaagaaagaaaaaagcagatccacagtcccaggtggaatgtgatccaagctgatgtcttgttatcactgcagaaatatcgatgtgatagtctaccactgttcgctcagaaccttctagggttgcctttctaaaatctgaattattcagaattccgaaacacatcaggcccaagaggtttaggaagggatcatgccaccgtatatatgaagaaagcacttagcctagtacctggcacatagtaaatgctgtgtcaatgttaaccatttactgttgctactattactagttaaagtgcttacctcaccatccgtaatcatcatcatggaaaagcgagtgataatcacagtgagataccgtgacacacctgcttcagtggctacgataaaaagagggcacggaggagctgaggtcagagagttccacaggaggtctgctagggactggggccttttccttacatggatagggggagggttctgagcagaggaaggacatgatctgacccatagattaatagagtccctctggctgtgtgtggcagcaggagccagagccaggaaattggggcagaagctcctgctgtggtccatggtcctgcctgtgggggtgtgaaggaggggtgagcccatttatatcttgaaggtggagctgacagtgagtactgatggcctggatgtaggggtgagagaaagagagggggctaggatgaccctgaggtttgggcctggacaccagctgaggggtgaagatactgcattgagggaccccagggtcggggtttgcagggagtggcagaaggccttgtgaagaatcagagacgtggctgagtctgttcggtgctgggtgcccgtcagacagctgcgtgagatggcaaggagacagttggatacgcatacctgaagttgagagaggtccaggggggagaaggaaaagtaggggtccccagcacagaggtgttgaaatcacgaggagagccgtgtggatggggaagagcgaagctgtgcggagagacggcgaggaatcagcgaaggaggctggggagggagtgccagtgaggagggaggagacctggagagtatggacccctgcagtgaggcaggaggttgatgagggcccgaggtgattgctagatgggaggcacaaaaggctgaagggagcaggttcaagagagacggggctttgttgaggcctgtgaaggtgtgactacacgtgttgtttgttgctttctctctgttcaggccacacctggcacacaatagctgcacaataaaaatgtgttaaattaatgtcttcatggattggggagaggttagaacgcagaggagcccttggaattgggggtcgtcactgtggagtatggcagaagtgtgttctatggacctgggctcctgtccccagatgatgatggggaaggagaatcagaaacataacccagacatctgggcgccccccagaccatttacttagtgcctggtgccaccaacaggactgacgtggcatccccatctagagaatgagtctaataataatactgactcatggagctgttgtcaggaatcaatgagataatgctgtaaaacatcatcagtgtttgataggcttgagctgttgttacaagttaaatcctatcattaccattattctggcttcatggccctcaccacctagtgggggagatagatatcaaataatcaggctgggcgcagtggctcacacctgtaatcccagcacttcgggaagccaagatgggcagatcacttgaggtcaggagttcgagaccagcctggccaacatggtgaaaccccgtctctacaaaaaatacaaaaagtagccagtgtggtgatgcgtgcctgtaatcccagctactcgggaggctgaggcacaagaatcacttgaacccgggaggcggaaggttgcagtgagctgagatcatgccactgcactccagcctgggtgacagagtgagactctgtctcaaaaaaaaaaaaagataccaaataatcactcagccacgtaatttaactgtggcaatgaaactataaagaaaaggtacacagccactcgagaggctaaggtgggaggatcgcttgagcccggggggtcgaggctgcagtgagccatgatcacgccactgcactccagcctgggtgacagagcaagaccttgtctcaggaaaaaaagaaagaaaaagtgcagggggccttgagagagaataacaggcaggaaggaggtgggggtcttattccaggctggggtgggcgtgggagtgtcagaggaggcttttctgaagaagcaacctgtgaagctcgacggggaggatgaacaggaactagcctggggtgggctggaggctggggcattttggctgggagaatagtctgtgtgcaggtccaaggtgtcgcaggtggggaggaactgggtgtgttggaggagcagagtgcgggaaggaaaacttgggtcagctggtctggtgagccacggtaggagatttggactttcttcccacagcccctgggagccacagaagggttttcaggggagaagtgatacaacttcatttaattctttctaaacttctgtgtgcactttcaagccttgatgtcctgacactcttcctcccccaggacagtttgtaccgctccagggtcacgtcagagactccagagccgcctccaccactgtgattccttgaagctttttgccgtcatctggccactcagtcggcggggttgagaggagctttctatagacgagaaggtgccctggttctcgactcatcagcctctaggaaagaagcagcttgctggtccatcccaggctgctgggaggcccgagaaacaggtcacagcagccccgcctcctccatagacctccaggcctctcaaaagggacccccacctgctgcccgcaaagatggcctcatttcctctcaggcccagcgctgccagcagcctgtcccccctcctcatttccctatttcttttgagtggccagatgacagcacaaagcttcaaggtcgggggccgtggggtggtggtggagtctttgacctcatgccgatcaacgtgcttctctcggttccctgttctgggccctgccctggaaagaggcagggtggccggggaggggagtttccagattacctgtgtctcctgggcatggcacaggaaatgactccttcataggctgagagttttgggaggccctgtgccacaaccccccagcaagagcccacatgaatccgccatctcgcccgcagcctggggatgctgctggattttccgggtgtggaggggcccaggtcccccgagcagctcctctgaccccgcaacccggcatctcctgtgcccgagtggcgtctgtcagttgctcagtaagtggagggctttgctgtcccttctgctgtacccacagctgcccgctcagagcaaggtggctctgatcctgcaggagggggctctctttgagagcacttgggtgtatcgtgtctcagaaaacccacatggcttgtagctgtggctgcctaacagcaccacctgggtggttgagtggctcttccagagacccttaagtggatgggctccccagccaggcgtggtccccactgctaagtatgttataggtgttgacccacttagtcctcccaaaaaccctgtgaggcaggcactatccagttttacacatgaggaaactgaggcacggataagttgggttgtttgcgtgagccacacaggtaggaagtggcagaaccaggatttgaacccagaccatctggcttcataatcactctgctatacttcctgccagcctgttctcccccgccgacacacacgcacgcacacacgcacgcactcacacacactcctacacattcctctctctgtcatatcacctggtttattttcttcatggcacatatcacagtggatttgtgggcttgtgtattgcctgtctacaccctatagtatagcctgtgagctcctgtttgaccataggaattctgtgtcttgtgcattgccatatccccagcatctagaacaggacctggcccgaaagagctgctcagtaaatatttgttgaatgaatgaaccgacatggccagtgacacaatgtctcactgggtaggtttgtgttattttttcctccttcgacctcgatccctcctgccactcactttatagtagaggcagtcacaggcgatctgtgggtagagcgatgattgaacccgggccgggctgaccccagagcgcacgctcctttgcccgcccctgccacactggtatctttcccttgatgctgacggagggatgtgacaccgcagccagccaggtctcctcatggagggcctcggaccacgtgtcattttagagaccccagcggcagtccagatcctgaagtccgacctttgattcaggaacagagcagctgcaggagtgccaggctgggctttctggtcctgtctctcatcctcagctccagtcagctggggattaaccccctgccgtcatcaggagaaatacaacatgggaaaccggcggtaactccactgtggtaaaggatgtgagggaaacagtgacccactgcagagggtttcctgagctctcgtgcacagagaatcgtgcgtgtgcctctgggtgggcaggggacatgcagcctgggtgaacatttcccatacactaggatgaattggcccttcctgttcatgcctctaatgccccatttccctcctacagagattttctcttgtttaacaattaaaagatagcaggctgctttgtggttctcagtcaggatgctttttagttgcaagtaacaaccctggcaccatctggccaatggttaagacatgtgatgtgttctagaagcccaggggtggatgggcaccaggtggataggatcagcagctcaagcatgtctgtcagggactcaggttctcagcctccaaaggcctctgtatgcctcttggttccagaatggcttccagtgataatcagggccacttgcccttgtccacaggcatcaggagagagagaacacaccccactgatggttataagtggttcccctcagtctacagctggtccagctgaggtcacgtgcccctcaaccaggccggtcaagttactagaggaatgccacatcctgatcactcttgaccaactgggttctgttgtctagtagctgaaaaaagcagaagtggaaactgagtagacaaccattaatgcctgccaagctcagtccctgaccaagtcccctccctaagttagcaaatcgtgtcaggcccaacagattttgtggcatttgagaacaaagaagtgtggttttcttttgaagaagtttagtgacttgcgtccaatttctgcctcctgcatcatccaccctcagttaacacccaaaaaagggggcaggctgggcgcggtggctcacacctgtaatcccagcactttgggaggctgaggcgggcagatcatgaggtcaagagaccatcctggctaacacggtgaaaccccgtgtctactaaaaatacaaaaattagctgggtgtggtagtgcacacctgtagtcccagctatcgtgaggctgaggcaggagaatcgcttgaacccaggaggtggaggttgcagtgagctgagattgcgccactgcactccagcctgggcgacagggcgagaccccatctcaaaaaaaaagcggggggtggacagggggcaagtggagtctggctgccaaagactacttgtctgatggtggggaaaaaaaatgggtgtctcctcccttgtcactgggaaggtttttgtttctctttccatcttcatcctctataggtcctttcattccttcccccagtctgaaatatttccggtgtgtctgtagctgtgcacacatccttgcaaaatatatattgaggtttgagtaaagagtcagcttccggggtttggagctctgtatctcattctttcggtttcttctggttttcaccaaatagcatgtgttcgccatctagccacgttgctggatgtgtgtccagtgtatggcgtctggcagctgaacagttgtacatgctgtacatctgccacggctcacgtgtctggtcccctggtgttgggcatccaggttgcccctagctccaccccacttcaaaccatgcttcaagtgagcatccgcctacctttgccttaggaacccatggggcttacccccaggagtcagttgcagccggagataggcattctctctccccaggggtgggattaaggcacctgccacaacacccagctaatttttgtacttttggtagaactggggttttgctccattggccaggctgatcttgaactcctgagctctctatgaggctgctctgacccgcgttcccccgagagcacaggagggtcccgcttccccatacctctcgccactttgctgttgtcctgcttcccagtttcaccaatccgaagggtgtcaagtggggtctccggggttttaatgctctgatggtgagtctggctgagtgcctcttcatgcccctgttaacctaattcaggctcccctttccaagagaggcccagtcagcacaggcattggaaggcaaattctggagccggtgacctgcgtttgaatcctgaccctgccatgtaacccagcaagttagttcacctctctgagcctcagagctgccataaatataaaatggaaataatagtagtatctatattgtaaggtattttgaggattaaatgagataatatatgtaaagcatttaagacagtgctggctgggcatggtggctcacgcctgtaatcccaacactttgggaggccgaggcaggtggatcacttgacgtcgtgagttcgagaccagcctggccaacatgatgaaaccccgtctccactaaaaatgcaaaaattagcccgacgtggtggcgcatgcctgtaatcccagctactcaggaggctgaggcaggagaatcccttgaacccaggaggcaaaggttgaagtgagccaagatcacaccactgcactccagcctggccaacagagtgagactgtctcaacaataacaacaacaacaaaaaaacagcgcctaacacatatgtgatctgaaagcattagcaattattatcactatcaccgtcattattattgttttaaagtttctaaactttcaaatgttgtatcctttcactttcaatgcacgtcagaatggctctgcctgtggaggaatttctggcttctcctgggtcgtccaagagacaatatagtcaaagttgtccgaagagcaggcttggagctactcctttctttcacatttgagtcgagtgctgtatattcatttccacgtgtgtagtttttaatttttaaaagtatgatgtgtgcgctgggcatggtggctcatgcttgtaatctcagcactttgggaggctggggctgatggatcacttgaggccaggagttcaagaccagcctgggcaacatggcgaaaccccatctctacaaaaaatacaaaagttagcccggtgtggtggcacacacctgtaatcccagctactccagaggctgaggcgggagaatcacttgaacctgggaggcggaggttgcagtgagccaagatcatgccactgcactccagcgtgggtgacagagctagattctgtcttaaaaagaaaagaaaatatatgtaaagtgtttagagcagtgcctggcacatggtaaatgctatagtcatgtttgtggatatcactacatttaccagagttttctcctctgggtagcacataggttttaatgtgacgtgataaatactttttcttcacagctagcatttgtctctgatgactatctctagacatgttctcacgttagcatgttaaatgtaccctctttctttttaatgactgcctgtatcatatggacatatcaaaatgtatttactgattctttaatgagagactcttgggtttcatcttttcgtctttctcaagtagtgctgcagtggggagcctcgtccaagaagctctgggttcttgagccagtgtttttactggagccagaattgctgggtccagggatatgcatggttttgatgtaatgaactgacaagttgccctcaaagacggttctgccactagaacctggtgtatccccaccaacagaatacagacctgttggttttgatttgtttcttagtttggtttggtttttttgtttgtttgtttgagacagggtatctctgtggcccaggctggagtgcagtggctcgatcttagctcattgcagactcgaactcctgaactcaagtgatcctcccacctcagcctcctgagtagctgggaccacaggcacacaccaccacacctgctaactttttaatttttttgtagagacagggtcttgctatgttgcccaggctggtcttgaactcctggtctcaagtagtgttcccgtcttggcctcccaaaatgctgggatcgcaggcgtgagccaccacgccccacttgagttgttttagtaatggggaatttcaggcatttacaggggtagaaatagcatatattgcctgcatgtacacagttgtcaccagattctttggtgaccaacacatggccagtcttgtttcatccattcctctgcctttggatcattttgaaacaaatctcgaacattgtatcatttcatttggggagctttaaactgcatgcccacagcgtgcctgtacatcgtggaagagaggaggacatttctataaaatcatcctgtggtgcttttcattttccatggtgtgtcttctcccttgattctcagatgcccctaagacatagacaaggcaggtgtatctgttgggaaaacagaatccactctaggtattttagcggaaggaattcaatacagggaatttggttaaaaaagttggggaggagcagagaaaccaaaaaggggcagaggccagtccctagatgagcaaccagagctgaagggcgcaaggagtagggcaccttagcagagcccagggcagtgttgggcggaggcctcctccgcgtgagatgctgtccacattggagggaggaccacctggcttctcaccacctctaccttccaggcttctgccactgcccctgttggctgagcctcaccagcagtcctgggaaatgtagttccctgtgtttcagagcaggctaggaaaagggcaggcaatggatcaaagagggaactcgatccccatttgatagatgagaaagccagagggtctaatggcctgtcaggggcacctcatttagtgacaggcaccatccctggcactgaggtaagtcccttggttgccagggtaacctgaggcagctctttgggcattgcatgccaccagccagtcactgctgcctgggatgggcctacatggttccgagttcctcctctgccggaggagtcccctccaagcttccccctcccacactcagagtggacactgccttttgttcctgcccatcgcactgggctgtgccctgaccctaaggaaagccctcctgaggacaccgtgccggagagttctgggtgctggagtattctcagggagccccctgcatgaggtaccagcatcctgggccacactagaggccagaggaatgttgtgccactgagcagcccaagctggcattgagcgggcagctctgtactcagctggcatcaggcaagtgtgggtgggagctgtgctttgtgccctcctggagctggtggcttcacggaggtgaggggagcccaggggagatggaaggtgcccagatacacaaacagggaagctcaacaccaatgtgagagtttaaaggagacagagaagcccagttacacaagaaagcctcggtcagaagcgacgtgattgctaaggtgacctgggcccttcttgtaaagcagacctgtttcaagtactttacacttattcacttagttaattctcataataatcctgtgaggtaggtatggactgttaaccccagagagttaagtaccttggccaaggccacacatctagggagtggcacaccaggaatccatataatagtggtagtaatagccatggacacttcctggtggtcacctatgccaggctgccctcagagctctacatattaactcatttaatcttcacagtcaccctatgaaggaggtacttttttttttttggagatgggggtctcgctgtgtcacccaggctggagtgtagtggtgcaatcacagctcactgcagcttcacagtcctgggctcaagcgatcctcccacctcagcctcccaagtagctgggatcacaggcgtgtgccaacacgcccagctaatttttattattttttattttttggtagagacagggtctcactttcttgcccaggctggtctcgaactcctgggctcaggtgatcctctcgccgtggcctcccacagtgctgggattacaggcgtgagccgccgcgcccagccttcttgtttccattttgtgaggttggtgcaaaagtaattgtggtttttgccatcgaaagcaatggcaaaaaccgcaattacttttgcaccaaccaaatacaaatgaggcaactgaggcacaaagagatttaagggacctgtccaaggtcacacggcagagctgagttcaaacccaggcagcctgagttcagaatttgtgcccttaacggtggctcatgcctgtaatcccagcactttgggaggccgaggtgggcggatcacctgaggttgggagttcaagaccagcctgaccaacatggagaaaccccttctctactaaaaatacaaaactagccaggcgtagtggcacatgccacagggaggccactcccatgcacagcagttaggaattggttggaagtccttggaggtgattggcctgtgagttatgtctagtttgtgttgagaaagtgtcttcgaggacaggagtggtggctcatgcctgtaatcccagcactttgggaggccaaggcaggcggatcacttgacgtcagaagtttgagactagcctgaccaacatggtgaaaccctgcctccactaaaaatacaaaaattagcggatgtggtggtgggtgccagtaatcccagctactcagcaggcagaggcaggagaatcacttgaacctgatctcagcagtgagccgagatcgcgccaccgcactccagcatgggcgacagagcaactccatctcaaaaaaaaaggaaattgtctttgaatccaagtttaggggaaaaaaaaatcatctggagttggtacactctcttggtcacaaggagaggcctttggaagaggagctccacagcttcagtgatggtgataagagaaccttttgtttggcactaactggacagcatgccctcccacacagccgtgaagccactgttgtcgtccccactttccaggggcatcacacgaccttcctggcctgtggtcgctgctcaggccatggggatggctgcgcttctgccatgagtccttggtgatagcaggtgaacggtgaagagtccatgttcccgggagcccctgctgctggtggaggaatggacaagtaaacgactgaatagagaagcacgttggaaccaagacttctccaaagccagtgcttgtaactgattcggggtgctgctgtggcgtggttaggcatagaggctcacattctagccttgtcgcttcctaactctgtgactttggtctggtgacctcccctgctggccttccgtttccttagctgtaaaatgatctggtaagacctccatcagtcaagattgcaatcggctacatgtaacaaaaaaccagtaagccgtggcttcagtaaggcaacaggtggtctcttacacatgagaagaaaagggagggagggcagctgggggcggcgccactgttggggggtgcagggacagggagcaggctccttctgactcctcatcttgctgtccccagcatgtcactctcagcctcatgctcccaagatgacggttgcaccccctgatatgacatttatattccaagtacaagagaagggtagaagaggtgtgccccatttatttattaggaaaacaatagcttcgccaaaaggtcccatcccccatcccctgcaaacttcctcttccctcacactggccataatcagatacatccttagtttagctgcgtgggaatccaggaaagtaagctttttggattagtatcctgccaccccaacaaatgtggacctctctcaaggaatcagaagaggatgggtttggatttgacaaccagcagtggagcctgaggtgcctggccctggagtaacccagagcaggagtgcgggattctcccactgcgggcctgacttctggtttgtgatgtccaggaatgccactgctttgtgccctgtttcttcatctgcatgttgagagtgatgccccctgctgaggaacacttgggagaagctttaaaacctggctgggaaggactttgaaatacatcccaccccataggagagctgaggctggcttttgtttggaaaattgtcgggttttcttcaagtggagcccagccgaactagccgattgactgccagagcccaaacatactgccctgagacggctcatttattcacctctctccctcccgctcgagtctgaacagtgtgggggctgagagtgggagtgatggctgcggctctgcggccagcatctggcacagcgcccagcacccaccaggtacccggctgaggattgactgccttgcttctgagcacctcttgatctgaggagcagtcagatcttccccagtcggtcccttctctgcaccagcaccaccctccttctgggctaggccactcttgcccccacgtgggtggctaccctggcctcctgatgaagcctctgtaccctcggcaggtcacgatctccatgacagccagtcgggccactgcccccctaaacctgccatggaggtcaactccagattcctgaacactgtggcatccttgcacctgtttttcctccatccccctcacccactcacacccctttccatggccaacttctcatccttcagggcttaaacaccaccccttccatgccatcttccttggccacccactctccagcaccctgctcccatccttcgtcagtttaccccttccttctcttgctttagactgatttgtgtgcttaagtgcatttaattaatgtttgtttcctcctttagtcagtggacagagaagggggctatcgtggttactgctttgttacttatcacatagtaagatctcaggaaatactcacctagtgaatggaagtaaatcaaatgaatgaaaacttgtttggttttttttccccctgattttgaaacattcactgaaagtaatatgaaaaaatatggaaaggggccaggcgtggtggcccacacctgtaattccaacactttgggaggcgggtggatcacttgaggtcaggagttggagaccgcccggagcaacatagccagacctcctctctacaaaaaatttaaaaaattagtcaggcatggtggtacacacctgtattctcagctactgacagaatgagaccctgtcgttaaaaaatatatatggggaccgggcgcggtggctcaacgcctgtaatcccagcactctgggaagccgaggtggtggatcacttgaggtcaggggttcgagaccagtctggccaacatggcgaaaccccgtctttactacaaatacaaaaattagtcaggcatggtagtgggcgcctgtaatcccagctactcaggaggctgaggcaagagaattgcttgaacccaggaagcggacgttgcagtgagctgaaatcccaccactgcattccagcctagagtgcactccagcaagactccatctcaaatatatatatatatgtatatatatgtgtatatatgtgtatacatatatacacacacacacacacgtatatatatacgtatatatatgtatatatatgggaaggtataaagaacagattttcgaaaaccactagtagccccagcatcaaattatcgagtctttcctgtctttttttctgggaatgcatctgcatagcctatagatgtttactgtcctaggggttgataatttctttaatggtactcctggtgttgctcattgaggttgggttttttgcctgttataaaggatactatgaatttttctgcatctcttattatttatttaggattaatttacagaagtagcattcctggttcagagggtgagaacttttttttttttcttttgagacagagtctcgctctgtcgcccaggctggagtgcagtggcgcaatcttggctcactgcaagctccgcctcccaggttcatgccactctcctgcctcagcctcccgagtagctgggactacaggcacccaccaccacacctggctaatttttttttattttttattttttattttttagtagagacagggtttcaccatgttagccaggatggtctcgatttcctgacctcgtgatccacccacctcggcctcccaaagtgccgggattacaggcctgagccaccatgcccggcctgagaacactttttaaagctcttgccaaattgcccctagaaagggatcaccactgggaacattaaaaaagaaagaagtctgttgtcctggggagtggccagtttcctggtgtgctgggctcatcgggctcctggagagccattttcctggtctcctgagggcctggtgtccccttccagcctgctgtgctctgcctggcctgggttgcagtcccggagcaggatgtttgattatggtgttgagcaaacagaacagcaggccctcgccatctgccagctggtccctcgggcttgagaagagcttcacatccagcgagggtcataactagagcctttctagagccttctgtggtgctgctgaagggtggggctggagtgctcattcctaacagtagcctggccccacaacccccattcccacacacctctccccactgggaaggaagacaggtgcccccctgcatgtctcaggtgggtagaggcgcctcccctctgtccccagctgtcacatatggagagttgtcctgaaactgcctctgtgagggtgccccgctctccctgactccctctgggctcggagggagtgcacattcccccaggcagcccgcaatgtttgtgttcatccaggcgaagtggccctgcaggttctgggagtggaaatctcttataggagagagaaagtgaatctcaagctatggcatgagagtgactggggtggcacagagggtgatcaaacagctgagttttttgttgttttgttttgttttttaagacagagtcttggccaggtgcggtggctcacgcctgtaatcccagcactttgggtggctgaggcaggtggatcacttgaggtcaggagttctagagcagcctggctggcatggtgaaaccctgtctctactaaaaatagaaaattagccaggcgtggtggtgcatgcctgtaatcccagcttactggggaggctgaggcaggagaatcacttgaaaccaggaagcagaggttacagtgagctgagatcccgccactgcactccagcctgggtaacaagagtgaaactctgtctcaaaaaaaaaaaaaaaaaaaagacaaagtcttgccctgtcacccaggttggagtgcagtggcaccatcatagctcaagtgatcctcccgcctcagcttcctgagtagctgagtctacaggtgcatgtcaccatactcagctcattttttttttttttggtagagatggggtctcactgttgcccaggctggtttcaaactcctgggctcaagctatgctcactgcctcagcctcccaaagggcttgtattacaggtgtgagccaccatgcccagcaaacagctgagatttttttttttttttttttttgagacggagtctcgctctgttgcccaggctgcactatctcggctcactgcagcctccacctcccaggttcaagtgattctcctgcctcaacctcctgagtagctgggactacaggtgcctgccaccacgcctagctaatttttgtatttttcatagagatggggtttcaccatgttagctgagattttaaaatacatttgtatacattttaaagttgcttatgtcatacaagagtaaaatctcactgtttaaaaataactcatgcaatacaaaagactttaaaattctgttattgtgaaatggaacatacatacagacaagcatgtaaaacgtgaatacacagtttaccgaagaattccaaagcaagcactcaggtaacccgggtccagaaagagaacctgctggcagcctggaacccccatgggctctggccaccagaaccctttttttttccttttttttgagacagagtctcactctgtcacccaggctggagtgcagtagtgcaatctccggtcactgcagcctccgcctccaggttcaagcaattctcctgcctcacctcccaagtagctgggattacaggcacctgccacaacacttggctaatttttgtacttttagtagagacgaggttttgccatgttggccaggctggtctcgaacttctgagctcaggtaacccgcccacctcagcctctcagagtgctgggattacaggcatgagccaccgcacgtgaccagaaccctctttctaaaagcaactgctctctgcacttcacagtcaccatttcctggcattgtgaaagctgtgttccctagatgagcaactctaaataacgtggttccagtttacctagttttgaactttatataaaaacagttgtgaactgtatatgttgttctgtctggctttttcacttagtatcatgtccgagaggtgcattctagtttggagttaatgcatttctggtcctaaagcccattttccttgataaacagacaagctttatgagttctaatatttgtacattttgtttaatgagtattagaaaaaaaataaaacgaatccaacatggatattcttaagggtttaggcagtgagttggttgaaaggatcacgttcagtaaataatagtacaggtgggctgcggctatgcctgagcagaggtgcgtgactttggacagtttgggagccccagtggtgaggacagaatgaatgcacagatggcacacaccgtcgctcccctccctgagaaaccactgttacctctgggcctctgcctcccagatctttgctctgcaatgagcttggtaggtagataaaagtataaaatatgtagcttgaaagatttttaagtgctaactttttttttgagacagagtttcgctcttgttgcccaggctggagtgcaatggcctgattttggctcaccacagcctctgcctcccgggttcaagtgattctcctgcctcagcctcccgagtagctgggattacaggggtgtgccaccacacccagctaatttttgtatttttagtagagacgggatttcatcatgttggccaggctggtctgaaactcctgacctcaggtgatctgcccgcctcagcctcccagagtgctgggattacaggcgtgagccacctcacccagccttaagtactaacttcttaaatgtgggagtatgcttttcttccgaattagtacttcttggggtttctaggtttgttctctgattaaagtaaccaaatcccttgtaatattgcacttcagggtggggtaagaatgggccaggcagaccctgcctggaatacagggaactcaggggccaggacaatgcggcacatgccagtgactcttttatttagcacatggtttggtatctgcctcctgattttttttttctttttagagatggggtctcgctatgttgcctaggctggtcttgaattcctggcctcaagtcatccgcctgcctcgacctcccagcgtgctgggattacaggtgtgagccaccgtgcccagcctttctttttctttcttttgttttctataataatcttggccaattccttagcttccctccctccctgcagatgttgagaacttggaatctgggaggaggtgaccagaggggccaggcagaagctgcctgggacacatccttagtggtgagttgacgtggggttgtgactcagaagccagaaatgtgcagggccctggccatctgtgtgcacacgtgtgcaagagatatagagaaaaacagaatgagagacagacaaggacagggccgtggagagacaggtacagggatgcagaggggtagggggacaggagtacagagagatggagcagggacaagaaacatgggacagagatggggcggagatgaagagagatgggaacaggcccctgagacatgagacctgttggctggttaactagctggttggctgtttgggtaatggattagttaactggtcggttggttatctagttggctggctaattggttatctggttggtttgggatttttgagttttgtttttttttttcatggattcagaaaatactagtggaagattcaccctgttgatggccctgttttggatgctggagatagaccagtgaatggtggcttgctggcatttgggtgttggattgctgctccccacccctcaccccgatgagtgcactgtgagtgcaggtgctgttgaaaggatgtatcgcgtgcttgccatgtgccccttagtatgggagtgccctatggggatcatcttgctggatctaccagcagtctcacgaggtggcacttaccccctctggtacatattagggccagaatttgatcctaggcaatctggctccaaagcataagcctaatttctgccttaagtcacccaggagtggagtgcaggcatttattaagtgccccggtgttcatggctctatccccaatctttagagatgacagtggttttaatggccatagatttgacctgcctgggttcaagtccctcttctgctttccctcactgggtgctcttcaacaggaacatgctgctctgagcctccctgttcccttctgtaaagtggggagaacagtagggccttcctcctcaggatgctgtgtgggctcagtggagccaggtttgaggccagtcctgagtgggggctgccattgctatgtgcagcttagggagcttgaccacagggcaggatgcccacttgggctcatggttctgtaaatgccagtttttgctctcattttattattattattatttttttttttgagaaagagtctcactctgttgcccaggctgtagtgcagtggcactacagtgatctcagcgcactgtaactgctgcctcacgggctcaagcggttctcctgcctcagcctcctgagtagttaggattacaggcgtgcatcaccacacccggctaatttttgtatttttagtagagacagagtttcaccatgttggtcaggctggtcttgaactcctgacctcaggtgatccgcctgccgtggcctcccaaagtgctgggattacggcctgctctcatttttgacaacagatgttctcaaatggggtggccccatgagttgtcacgagggcagactcgagtcagccaatcccaggttcagattccggctcctcctccccttctctttgtggccctctctgaaccccattgtgaagcacgggtgacagtagcaggtgattagaagcttcagtgcaatggtttgtgttatggtgtcatgtgctctgcacagggcctggctccccgacagccctgggtcaggggccagttaggatgatggatgattactgccagcagctgggtttcccctccacccccctccccactccaacctggataacaaggcccagctgtgtgtgtccagcacctgcaccgcccccgccggcccccagctcccatccctgccagccttcccacggcagggagccttcctggctgtggtgttccgggtgggccccactgccgccccccatcccctcagcctagagccatcctcaggttaggataagcagagccggagccaccctcagcccggcccccagcggcaggatggaaagagtgggactttaacagatgttcttttacaaggattccctggctctatttaatcaagattgtcgaatattgatttaatctccaggcccaacagatgcggtcttagcaggtttcagtggcaattagctgggatcagtttgcaggtcaggctccgtgctggcaagacactgtcttctaaaggaggcttggcctggccacaggagtgagccctggaggagggcgcgtactaagtatttaaccatcagtctagcccgggcagtggcccacgggagcaggcccgcaggctgggtcatagcagcccctgtggggccccagtgttccccccatgatgatagtggggacactcagcccgtttagggcagcagctgttcactgagaaaaaaataataataataacactaaaagaagcagcacagccacgccagggcctgcggcttgatcatgagcctggctggagccggggagatccctgcagggcagcctggagccctgatgatgcccccagttaagtacccagaaggggccacaccaacaacagaggcctctcacctgcgctttcaggcccctcgcctgactgcatcccatcatccccactctacaaacatggctgtagctgctgggtgggcctggcatttgtgcccatactccaagaagcatcccattccacttctgcatttcaaaggctcattagagcgaataggactgtgcccagaactggaacaagctgcttcatccacatgtgcttcaggggaggtcacgacagcttcccttaacccagccaaccccacagagactcagaggggcgccccacccggccctggcactggggctgccagaaaggagcctttgctcaaggtgagccaccctgggctgtctggcccctgagcccagaggaacaagggttccttgccaggtcacatttggtttgcttgagattttttaaaaagtattattatataagaaaaaatgaaggccgggcacagtggctcacgcctgtaatcccaacactttgggaggccgaggcgggcagatcacctgaggtcaggagtttgagaccagcctggccaacatggcaaaaccccatatctactaaaaatacaaaaattagccgggcgtggtggtgtgggtgcctgtaatcccagctgcttgggaggctgaggcaggagaattgcttgaacctgggaggcagaggttgcagtgagccaagatcgcgccactgcactccagcctgggcaacggagccagactctgtctcaaaaaaagaagaagaaaaaatgataatagccaattctcgtttatcactgcaggccagggatattctaagccatggcatttattaacccacatctttcctaagagttaagctgtattattatctccattttacagatgggaaaactgaggcatagagagactaggttgcctgcccaaggtctagctagttaagtgatggagctgggaattgaaccaagatagactttgcttctatccactctgctgcagccaccacaccagggaagacctccagcatctggtgataagtgagagaggcagctgtgaaggtattcacccatttatttttttaaaaatttcatctctctacgcaggcgtgtaatcatatgaacatttaacctataaataaagttcagttataccaggtagcaaaattaaaattagacatttcagtttaagtatttggggtgattacagcctctatttccctggggaatatgtgaacacaaggtggggtgcactgtccttccctcattggctctgcgtgggagcctgtcgccaggccacggaggactctgcctttggaaacatgcaaattgttcagactccatgggccctcaagtagagagctctaactgtgcagcttggaagtctctccccattctgacttctagaaggtaagggccttgcaaggggtgactctcactctgctcatgttttccctcacatgctgactttttttttttttttttttttaagatggactttcgctgttattgcccaggctggagtacagtggtgcgatcttggctcactacaacctccacctcctgggttcaagcaattcctcctgtctcagcctcccgagtagctgggattacaggtgcctgccaccacacctagctaattttttttttgtatttttagtggagacaggatttcaccctgttggccaggctggtctcgaactcccgacctcaggtgatccacccgccttggcctcccaaagtgctgggattacaggcgtgatgcgttactgcactaaaagcacttcacaccatgcttggcgtgcagtgagcacacgctaagtataagctgtgttcattcccttggggctgcgtgggcatcttgcatgcattacacatagctctaccttgctatttatttatttatttatttatttatttttgaggcaacgtcttgctctgttgcccgggtttgatctcttatttatttatctatttatttatttatttatttatttatttatttttgaggcaacgtcttgctctgttgcccgggcttgatctcttatttatttatttatttatttatttatttatttatttatttttgaggcaacgtcttgctctgttgcctgggcttgatctcttgaggagatcctggctaactgcaggcttgaactcctgggctcaggtgatcctcccgcctcagcctcttgagtagctggtactataggcatgcaccaccacacctggcaaattttaaaaaaaaaatttttgtagagatagggtctcgttatgttatccaggctggtctcgaactaccaccctcaagggatcctcttgcctcagcctcccaaagggttgaaattgattacaggcctgagccactggcctggcctagctctttttgtacagatacattgtattccctggaatagaggcacccggattcacttaacccttcttgtgctggtgggcatttgggctgttctcagttcttctgtattacagcaatgtaaaacagtcaaagcatcgtgtacctttcttgacgtagactggtgttattatcagagagacagatttctggaagtggaattgctggattaaaataaatagaatgaagccaggcgcggtggctcacgcctgtaatcccagcactttgggaggccaagacgggtggatcacttgaggtcaggagttctagaccagcctggccaatgtggtgaaacccctgtctctactaaaaatacgataattagctgggcatggtgacacatgcctgtgatcccagctactcaggaggctgaggtaggagaattgcttgaccaaggaggcagaggtttcagtgagccgagatcacgccactgcactccagcctgggcgacagagcaagattccatctcaaaaaagtaaaaataaaaataataaaataaatagaatgcacacctaaaatgttgatgcataattccagctctctctcttgactttccctagttgggaaaaactgtactgatttaacacccttaaaagcagaatggatgtgatggctcacaactgtaatcccagcagtttgggaggccaagatgggaggatcacttaagcccgggagttcaagaccagcctgggcaacgtagcaagacccagtctctacaaaaaaaaattaaaaattagccaggtgtgctggcacacccctatagtcccagttacttgggaggctgaggcaggaggatcacttgagcccaggaggttgaggatgcagtgagccataatcacaccactgcactccagaccaggcgacagagtaatttaaaattttgatgcacagttctaacttattctttctattcccccaaggggagaaaactctactgatttaacacccttaaaagcagaacaggtcatgcaggaaccctgacctgtgtgggagccttgccaatttgaatgtaacagctggacgtggcctccctctctcctgtggggactgccctgggtccctgggtaggaatttgggctccttctggatgctggaggagatttgttttagaaacaccaatcctcagccgggcgtggtggctcaagtctgtaatcccagcactttgggaggccgaggcgggcagataacctgaggtcaggagttcaagaccagcctggccaacatggcaaaacccatctctactaaaaatacaaaaattagctgggcatggtggtgcgagcctgtaatcccagctactctggaggctgaggcagaagaatcgcttgaaccccggaggtggaggttgcagtgagccgagatcatgccactgcactccagcctggatgacagagtgagactcagtctgaaaaaaaaaaaaagaaagaaagaaacactagtcctctgggctctttgacgttaaatgtggaagtgctggctttcacagccgtggctgagactccactcgttgctcttccagccagtggagcagagtctctgccatggcactagctaatgagatttctaagattttcatccatcttatttcctgagggagctctgtagtggtcccatgtatgctcaaactcccagtaaggttggggaagacatagaggggaaaaatcagattttttttttttttttttttgagacagagtctcactcttttgcccaggctggagtgcagtggcgctatctcggctcactgcaagctccacctcctgggttcacgccattctcctgcctcagcctcccgcgtagctgggactacaggcgaccgccaccatgcccggctgattttttttcttcatattttttagtagagacggggtttcaccgtgttagccaggatggtctcgatctcctgacctcgtgatctgcccgcctcggcctcccaaagtgctgggattacaggcgtgagccaccacgcccggccgaaaaatcagattcttaacgtgcaatctgctgagctgttgctgacttgctggaattttgtccttatgaatggattttaaagacagtcagcgtcattcacgtattcccacagcacactcatttgaacgatttcatcttatttggagcacagggcaaaggggtggcaggcagactgttgaggtttgaatcccacctgcccctcgtaacctttgcctcatctgtaagatggtcatgatggaagtccctacttggcagggcatggtggtttgcacctgtaaccccagcattttgggaggccaaggcaggaggatcacttgaggccaggagtttgaggttttgtgagacctcatctctacaaaaaaaaatttttaagtaaaaaattagccggttgtggtggcacacagctgtagtcccagctactcaagaggctgaggtgggaagattgcttgtgcccaggaatttaagggctgcagtgagctatgattgtaccaccacactccagcctgggtggcaaagaccctgtctcaaaaaagagaagagaaatttatttaaaaaggaaaagaagcccctacttgatacagttgttagaacacaccagttaacacacgccagtgtgtagccctgaatctggcgcatcaggagagctcatcagtgttgaccttatgtttaataccgtcatcaccgtattatccctctccactgccccgcccacatgtgagaacaaatatgttagatcccagtccaccccagacatgcatctgttcacagtctggggaagacagaagatgctcagaggcttaaaaatccagtgggctaagtcccatatcaagggtgcatgtacatccccgggagctcagcagagggaggaaagggggaattctgcctggctttagtgggacagacagcatggggggacaatcggagggaggcgaggacaaggcgctctgaatcagtgaacccctgaaataactcctgcaaaggtcaccagtgcccttcatacctataactgccaccatacgtgactctttgagcagcgtccactcctgttgacagttggtcctccccaaccacacctgcgctccagcctccctgctgggcctgctgtatctcatgtcctggctcccatcacccacctgcccacttggatgtacagcctctccgagctcggaggcagaccctcttctctctgctctctctgttccttctgtcctcacctaagactgcacagtagaatcagctgccgagcttttaagaggcactcaggcctgcgccccaccccaaccagctaattcagaatctctgggagtggggtgtggacagatacctatatatttttttttattttttatttttgtgagacagagtcttgctctgtctcccaggctggagtgcagtggtgcgatctcggcttactgcaacctccacctcctgggttcaagcgattctcctgcctcagcctcccaagtagctgggaccacaggcacgcgccactatacctggttaattttttttttttttttgtatttttagtagagatggggttttaccatgttggccaggctggtcttgaactcctgacctcaagtgatctgcctgccttggcctcccaaagtgctgggattacaggcacgagctaccatgcctggcccagacacctatatttttataaagctcctctgtacctctattgtatgctggcaggaagaccagtcccccgagcatccccatctggccttggatactggctgttcccagcttccctgctcatccacggcaggtaccctctcttcttgcagatcctggtttagacaccacccttcaaggagtcttcctgaccccctcccaactatagtgatcttcagtcctatctatctatctatctatctatctatctatttttgagacagggtcttgctctgtcacccaggctggagtgcagtggcgtgatcacagctcactgcagccttgacctcctgggctcaagcgatcctcccacctcagcctcccatagtgctgtgattacacacatgagccactgcacccagccattttatgacctttacaatgctggccacccttggaaattctattttatttctctggcgtttctctactggaggtccattcatgagagcaggggcacagtctgtcctgctcagagattttctttagcacccacagcagtggcgtgtagtagaaatagattgagtaaatgaatggatttcgagtgtttggtgcttgtagaatgaatgaatgagttatacatgactgggaaatggtgaataaatgaatatgtttttagggctttgttggctggaagaacttttttgagggatttataagaacatggtaggtgtttgttgtgtgagtgaatggatgaatggatgcattttaaggactaactagttcttcctggataaacaaatgacttgtacgtgcccagaaactgctgagtcactggatgcatgcctggaggagtcctcattccacctgggccttagagaggaaccctcggacttgatgccacatccctgagccctccagagtgcttgagccccacttagcctccatggccgtgactagatcatgtttccctgaaagggagatgcttggagcacatcagggcagccctgaacacccagggggtccctctacctctaagcaaaggcctgtgaaaggacagcccatcccacccctacaagctatctccaagcattgctttcagcttcttgggcgtgctgcttcccagggaagggcacactcgggcaccaagcaggccctgcttgccttgggtcacagaccccaactgagccagtgctccctggtcctgagtgaggttgtcatccatccagtcatttaatagttatgttgttttatctatctatctatctatctatctatctatctatctatctatctatctatctatctatctatctgcctgcctaccctacctacctgcctacctatctatgtagtgacagagtctcactttattgcccaggcgggagtacagtggcgtgatctcggctcactgccacctccctctcccaggttcaagcaattctgttgcctcagcctcccaagtagctgggaccacaggcatgcaccaccatgcctcgctaattttttcatatttttagtggacacggggttttaccttgttggccaggctgatctcgaacctctgacctcagttgattcgcccacctcggcctcccaaagtgctgggattacaggcatgagccactgtgcccaatcagatatttatttagaaaagaatttttttagagacagggtctcactgtgcaaccaggctggagtgcgtggttcaaccctgtctccttcctttgtgatcagcagggtcccaggtaagggctgctttgtctgctgggagtgaagttggcatgagcagggctctcagccagcctgtgatggacaggaaatgtgagcaagaaccaagcctcagttgtgaaagcccctgagcatctggggtcatttgttactgcagcatagcttagctcatcccgcctgtcccaagaaggaacacattttgtggatggggagtgatcaagagttcaggttgggaatgttcagttgcagtgcatgtgagatgtgtaagtggtgatgtcaagtaatcaggtgggtaggggggtttggaactcagaagagcagtgggagctggagatgttttccgcattggcgacacacgtttaaatgagaatcacagaggtccaggcgctgcctgtgattgcaaggaaggctggtgcttgaactcaggactgtctgacttgaggtaagaaggggctggggttgagtccccactgtgtcaactcatagccatgtggctatgagttacttcctctgtctgctcctcactttcctcatctgtaaaatggaggtaataatgatacccacctcatggggttgttgaaagggttaacacatagcaattgacaggtgtgaagtgctctggaaaggacctggaccatagaaggattctattcatggtagttgctgtcgtagatactggcttttgtgtatgttttcattgttgttttgttttataactaaaatgtccagtggtgggaaatggaatagggctgactttgtgtccaacttgatgcagagactcaaatgatgactacagccccagattctaactcccagtccccttcacagatagttcttctcccatggttacgagacagctgcagcgactccatccctcacatcttctcagacttagggttaaagggaaaagcgcagccttcagctccagcactcctggtaaagacatcacggtctcactggttctgatcaggccacatgggttgctccagagctggggaaggagccccacctctagcccattgggtggccattggagaggggaggctcccaaagggaagtcgggactgttggaaaaaggagtcctggcgacagggaaagtaaaccacaactgtccacattggagggctcttgtgtttccctatgctgtgtcctgtgagcttctggcagacattgcagccctcacagagttgggccttttggagccaagacaccaaggctgtggggcttgcttgcttgtcgcaggggcaatctgggagcatttacacccacagatacatcactggttgcctgctcttctaacagaccctgatgcgtccccactggcccagaggcaatcaggatggctacagatgctggctctcccagcttcccttgcaaccggagtggccgtgtatccacattctagccagtgggacataaaagaaaggattgcagcaaggggaatgttctgggaaagattctccttcctgattagggtcagaccggtgccctcaccattcctatctttcccctttgcccatgattcagtgggaagtgtggctgtggccaccagcttgtgaccgtgacgcagcaagccagaagacttgctcaatcctgcagcacaggagggaggcagagggaatggggggacatgcttcacatcgctctccagctttcccaccaggcctggagccgccatatctggcctcctggtgacatgagatgactaaatgtcttcaccgtgcaaagcaccgttggatagtcttccgttactcgcagccaaacacatcccaactgactgtctcccactgccactcactcctcattttgctgctgtctcccaggctgccctagttttccccatatacagttccccagctgccctccttcacacagcaccgtgtgtcactcggggtcctctgatgccagcagcagaagccacgcttggcagtctgtggccgaatcacaattcactgaggatgtacagaatgaacacgaggccagaggagcaatcttagaaaacagggagggagccaaggaagccctggagggaagaaaccaggggtccccagcaaaagtcactgcacaggagaagccaggtccactgtgcctgcccctgcaaggacactttccagcctcacatgctcttagaaacctcgcacggagtcctaggagaggaccctgggccgaccaagcccacgtcctgtgcccactccaactgtgcttctgtggggggaaaggggaagcacttctgccaaagatacacaacagaactgtagtaagagcaggtggtattatacccattttacagattgaaactgagtcactatttccataacccgtccatgacacacgaggattgagcccaggaggcagtctggttcctgcctatgctgtgcttctctcatcacgggggttccccatcgggaaggtccaagtgcttttagggaggaggagctcggtagaagacagctggaaagagaccagtgtgcaccctctgagtcccagaggctgcgggtgccactcagcctctgaatgtcacaggaagactcgactgcagctgctaggagaagggatttgttcagagagacgaaggcctgcaagaacatctgtgtgtgtgcacagaagggagcagaatggattgagggtttctgactgagctggaaacaaatgccatcagcaaagcccatctgtcgggaggtgcttgcataagcaagtcagggtcgcatctgggccactggttttcccaacccagccttaagtgtggcctcaaaggactaatcctccctccgcactctgcactctgaaggcagagccacaacacaggctgggctgctgaggacaggcagcgccctcaggcgggccatcatcccagcttgacctgggatctggtgcccagcacagcggactgtggggcagggttcaggctctcaagcaaacagtcttgccattctgtaactgacagtttagagtggagacaataaacaccatagataaaataattgcacttttctctggcaaaccagcaacccctgctgaagtgtgacccacacatacttattttgtttaccctcattgtgtgtgtgtatgtggtgttttgttgttgttgttgtttgatttttgagatagagtcttgctctatcacttgggctggagtgcagtggcacaatcacagcccactgcagccttggcctcccaaatagctggaactacaggcatacgccaccacgcctggctaagttttaaaattttttgtagagatggggtttcactgtaatgcccaggctggtgtcaaactcctgggctcaaacagtcctccctcctcagcctcccaaagtacgggtattacaggcatgagccactgtgcccggcttcattgaggtttttattgttaatgttcttaggaagtgcattttacccttgaacaacatgggttggaactgcgtggatctatgtatacatgaatttttttcaataaatatattggaaaattttttagaaatttgcaactatttactgggcgtggtggctcacgcctataatcctagcactttgggaggccgaggtaggcagatcacctgaggttgggagttcgagaccagcctgcccaacacggagaaaacccgtctctacaaaagacacaaaattagctgggcgtggtggcacatgcctgtaatcccagctactcaggaggctgaggcaggagaatcgcttgaacccgggaggcggaggttgcagtgagctgagatggcgccactgcactccagcctgggtgacagagtgatgctccgtctcagaaaaaaaaagagatttgcaactatttgaaaagaacttgcaggggtgggtgcggtggttcacgcctgtaatcccagcactttgggaggccgaggctggcggatccctcgaggccaggagtttgagctaggcttgccaacatggtaaaaccctgtctctactaaaaatacaaaaattggccaggcatggtggtgtgcacctgtaatcccagctactcaggaggctgaggcaggagaatcacttgatcctgggaagcagagattgcagtgagccgagattgtgccactgtactccagcctgggtgacagagcaacactctgtctcaaagaaaaaaaaaacagaaaagaaaagatcttgcaggtgaaccacatagcctaaaaatattttttaaaaaataaaatgttaaggccgggcacggtggctcacgcctgtaaccccagcactttgggaagccgaggtaggcggatcacaaggtcaggagatcaagaccatcctaacatggtgaaaccccgtctctactgaaaatacaaaaaatattagctggccgtggtggcgggcgcgtgtagtctcagccactccagaggctgaggcaggagaatggcgtaacctgggaggcggagattgcagtgagctgagatcgcaccactgcactccagcctaggcgacagagcaaggctctgtctcaaaaaataataataataataaataagtaaatacataaataaataaaaataaaatgttaggtatgtcatgaatacataaaatatatgtacattagtctatttttctattttatcatttgctaccataaaatatacacaaatgcattctaaaaagttaaaatttatcaaaacttacacacacacaaacacactgccaagccaagagaaatgtaaacaaacataaacatgcagaattaaatcataactgcatgaaattaactgcagtacacactgcactaccgtcatagtttcgcgaccacctcctgttgctactgcggtgagctcaagtgttgtgagtatccatttgaaacaccgtgtgacactcatcatctccgcatgagcagtttgtctctccagcaaattgcacatcgcagtaaaaaatgatccctagaggttctcacctagttttcatcgtgtttagtgcaatactgtaagccctgaataacctcaggggacccgtacaaagtgccactagtgatgctggaagttgtcccaagaagcagagaaaagtcataacattacaagaaaatatgcaattgcttgatatgtgccatcgatggagatctgcagctgcagttgcccgccatttccagataaatgaatccagtgtgaggaccatcgtaaaaaatgaaaaggaaattcatgaagctgtcactgcctgtatgccagcaggcacaaaaaccttgcactgtttacaaaatatatttttatctcgtgttgcaaatgcagcttctatgtgggtacaggattgctataaggcatacctatagattgtaatttgcttcgagaaaaagtgaagtcattacatggcaacctaaagcaaaaggaagaaggaggatctcaagctggggaatttaatgccagcaaaggatggtttgataattttagaaagagtatggcttaaaaaatgtcaagatggcaggagaagcagcttctgccaaccagaggcagcagatgagttcccagatgccagtgagaaagtcattgaggaggctgggtacggtgcctcacacctgtaatcccagtacattgggaggctgaggtgggaagatcacttgagcccaggagtttgataccagcctgggcaacatactaagaccccacctctaccaaaaatttaaaaattagctgggcatggtgacgtgcatctgtagtcctagctactcagaaggctgaggcaggaagatcacttgagccctggagtttgaggctatagtgagctatgattgtaccactgcactccagccttgacaacagagaaagaccctgtctctaaaaaaaataataataaaaatgaataagaaaaagaagtaagcctgttcataagtgctaaggagaaaaatggagcagaggaagggcctgggagtggtggggatagacacacagaggcaagcactattagttttttgaaaattcttccgatcatctctgcatgatagtttgttgttgtttctgttgttttttcttttttctttttctttttctttttttttttttttttttttttttttgagatggagtctcactctgttgcctaggctggagtgcagtggagcaatctcggctcactgcatcctccacctcccaggttcaagcaatcctcctgcctcagcctcccacgtagctgggactacaggtgtgcgccaccgcacccagctaacgtttctatttttagtagagacggggtttcaccatgttagccaggctggtctcgaactcctgacctcaggcaatccacttacctcggcctcccaaagtgctggggttataggcatgagccactgcgcctggccaatatttttgcttttccaattgggaaatgttacatgcaactctagatttctgatttctgttggaaaatcagatgatctgacatccatactcccgcaagccttgattgtcagaagatgccctgccatccaggtcagtgcaggctcctcttggcctctctcctgtctcccttaggcaactcgaccctgagggctttccagcttcctctctcttctgtagcccatccctgtgctgcctcccggcaacatcttcaggatcgtttgtgttctcgtggggcaccaggaagaggggctcccccttgctccccactctccacctgccctcttctggtgctcactttttcagaggcttcaggctccccttgctatttgctccttgaatctgctttgagcttcccttgtgatctctgccagtgcgctccataactgggcataaattaggaaaagcccccctacacatgcgcatacatgcacacacacacacacacacacacacacacacaggcacacagacatgcacacacacacacaggcacacagacatgcacacacacacagacgcacacagacacgcacacacacagacacgcacacagacatacacagagacacgcacacacacacagacacacacacacagacacatacacgcagaagaggcctgctactttctcacacaggaagctccaatagccattgatcaagaacggctgcatccagctctagattcccagggaaagaaaagttagaggtcaccttgaaccaagtgcgtggcccaaagcagcactccactgccctgagcaaaatcagttccgttggcaggagggagcgggcacggctgctgggcagtcaacagcttccatcacagacggcgacccactttccccttcctctccagcaggattttcatcttctagaagttcaaggtggagacaaagggaagtgaccccgcagggtgttttatatgctggacagaagcacagactcccttccccaggggcctgcaaatcaggaggtacttacacctccaattaggcagaggccatctgttcactcatatgtataatactaaacgaacgtcctggacgttctagatggctcacgcctgtaatcccagcactttgggaggccaaggcaggcggatcatgaggtcaggagatcgagaccatcctggctaacacggtgaaaccctgtctctactaaaaatacaaaaaaattagccaggtatggtggcaggcacctgtagtcccagctactcaggaggctgaggcaggagaatggcgtgaacccaggaggcggagcttgcagtgagccgagatcgcgccactgtactccagcctgggcaacagagcgagactccgtctcaactgttctaggcactgggaatgcatcagtgaacaacacagacatccctgccattctggagccaacatttgagtggtggacctagccagtagacagaacgaacaactgctaagaaaaattggaagaaagtagagtgggtaattaagaaaggcttccagaagaccgggcttctctgtctctatagggtgatttgggaaggtttttgtgtttgtttttgtttttggggatttttttttttttttgagataggatctcgctttgttgcccaggctggagtgcagtggtgtgatcgtggctcatgcaatctcaacctcccgggttcgagtgatccttttacctcagccccctgagtagctgggactacaggcacatgccaccatgcctggctaatttttgtatttttagtagagatggggttttgccatgttggccaggctggtcttgagctgctgggctcaagtgatccacccgccttggcctcccaaagtgctgggactgcaggtgtgagccaccgtgcccagccggaagtccccatggaagaactgacatcatgggaaggaaccagccccaagaaggactgaggaaggatatcagatgtcctggataaggtttggtgcatcagaacagaaaagaaggccagtatgatcagagcttagtcagggatggggagagacatggaagccagatcctgcggggcttgtggagcaggggaaggagtttggatggtgttttaatgcagtaagtagtcactggggagatctcagtgaaaaagtgatgggctctgatttacccagtcatagtctgcagtaaccacatggatttctagagacattccttctgcagctttcctccccaaactccactggtgctcatgttgactcatctgtcattttcacttcctttctggcagagtagctgagctgagcaaacaacagagcaggtggacaatagtctggcctctgcatgaagccaccagttcacaggaaatacagggggcagaggaacatgttaagtggcacctcagggatcctgaaagtggggaaatccacaggacaggtgacccctttccttcaacaagtaaagagcatcaaaataaaggaaggtggccattgtagagtagaggagacttgagaaaatacctgcataagcagaggatgatttcgaacaaaccagctcacaaaagacacctgcgagacaatgatgggaaatgtaatgcaggcagggtagtgcatgacattaaagaattcttgttaatgtagatgagtatgataatgttactgtgatttttttttttaaatcttatgtactagagatacaagctaaaatatttatgggtgaaatgacctgatgtctggccaggtatggtggttcatgcctgtaatcccagcactttgggaggctgaggcgggcggggattgcctgaggccaggagtttgagaccagtttggccaatatgacaaaaccccgtctctactaaaaataagaaaaattagccgggcatggtagcacatgctggaattccagctacttgggaggctgaggcaggagaatcattcgaaccttcgaggtggatgttgcaatgagccaagcacatgccactgcactccagcctgggtgacagagcgagactctgtctcaaaaaaaaaaaaaaatgatgtctggggtttactctaaaacattctatcagaaacaaagaaggtcacaaggctgggtgaatagatgaaatgggaatggaaaatagttagtggttgttggagctgatgggtgactcagtctcctctctgcttttgagtatgtttgcaaatttccataataaaaagattttttaaatgagtaaggctgtcaagaaaagtcacatgtcccactttctgggagcagtaacacggccatcgcagctcatattttccttttcttccatttcagcatggcgaggacaacatccttgctgcctccagctggcgggcgaccacagctactgcctgctctgcgctactgagccactcggtctggagcccccaggacagcacctgcttcctgaggttgtcctggctcagctgtgcacagcgatggtggagaactggactccacaggctcacaaccttcctgtcaggtttcagggcccagcatccttcatcctgggcctggctgccctgaacaatggctgagggctgggggaccccatagagtgacaccacagcgtacggggccagcagcactccagtgcccgtggactatgaccacctatcgggccatccccagcgatggtgtggacctggcagccagctgtggcgccagggtgggcgatgtcctccctgggccacacacaggggactacgctcccttgggattctgggcccagaatggcagcatgtcccagcctcttggcgagagcccggccaccgccaccgccaccgccaccgccaccacccgccccagccccaccactcccgcaatgcccaagatgggcgtgcgcgcaagggtggccgactggccgcccaagcgggaggccctgagagagcacagcaacccaagcccctcccaggacacagatggcacaaaggccaccaagatggcccattccatgaggagcatacagaacggacagccccccaccagcaccccggcttcctcagggtccaaagccttccaccgactctccaggagaaggtccaaagacgtggagttccaggacgggtggccccggtcccccggcagggccttcctcccccttcggcaccgcagcagcagcgagatcaccctcagcgagtgtgacgcggaggacgcgggggagccgcggggggcccggcacacgggggcgctgcccctcttccgcgagtacgggagcacctcgtccatcgacgtgcagggcatgcccgagcagagcttcttcgacatcctgaacgagttccgcagcgagcagcccgacgcccgagggtgccaggccctcaccgagctcctccgggcagatcctggcccacacctcatggggggcggcggcggagccaagggggactcccacaacgggcagcccgccaaggacagcctcctgccactgcagcccacgaaggagaaggagaaggcccggaagaaacctgcgcggggcctcggcggcggggacacggtggactcgtccatctttcggaagctaaggagcagcaaacccgagggggaggctgggcgttccccgggggaggccgacgagggccggagccccccggaagccagcaggccgtgggtgtgtcagaagagcttcgcccacttcgacgtgcagagcatgctgttcgacctcaacgaggcggccgccaacagggtgtcggtgtcgcagcggcggaacaccaccacgggtgcttcggccgcttccgccgcctcggccatggcctccctcacggcctcgcgggcccacagcctcggaggcctggacccggccttcaccagcacagaggacctaaactgcaaggagaacttggagcaggacctcggcgatgacaacagcaacgacctgctgctcagctgcccgcacttccgcaatgagatcgggggcgagtgtgagcgcaacgtgagcttctcccgggcttccgtgggctccccgagcagcggcgagggccacctggcagagcccgccctgagcgcctaccgcaccaacgccagcatctcggtgttggaagttcccaaggagcagcagcggacgcagagtcggccccggcagtacagcatcgagcatgtggacctgggcgcccgctactaccaggattacttcgtgggcaaaggtgacggatggcgtgtgggtgggaaggttgggtgggccgaggcttgcctccgagacccccactactcattcattcactctgtgccaggccctgctctggcactgaggatgtggcgggaacagagacctcccttctggagggctgtgaggatccggtgagcagagccacccgggcctcagccctgtgtctgacacagcagcactccataaaccttgagctacaggacacagctctgcatttactcagcacatatggacttggggacagctcagtgccaggcactctctagagcctggggatgtagtatcaaccagcttaaaacaaatgttctgtcttcctagtacttataatgttttcatgggtaacacaaacatagaacaggataaatacgaaaaatacacaagggattgtaggctgctaaatgcagtggaaaagagtacagcagggaagaaggaaatggagtgtcggagggtgggggcagatcccagtgggggatggtcagagggggcctccgaggcaggtgcagtttgagtaccaagctgaagtcaccatgtgcaaattgcagacactgttcccagaacagagcagcgaatacaaaagtcttggaactgcccggcgcagtggctcacgcctgtaatcccagcactttgggaggctgaggcaggcggatcacttgaggtcaggagttcaagaccagcttggccaacatggtgaaaccgcatctctactaaaaatacaaaaaaattagccaggcatggtgacatgtggctgtaatcccagctacttgggaggctgaggtaggagaatcgcttgaacccaggaggcagatgttgcggtgggctgagatcatgccactgcactccagcctgggtgacagagtgagactctgtctcaaaaaaaaaaaaaaaaaaaaattgagaattgcttgtaactgctagtaacaggcttaaacaacatagaagggactctcctgtgaagaaatccagagttcagcagcccagggctggtatggtcagtcttaagcatcagtatggtcagccttagtgcatggcatgatcccccactgctccacaccaagatggctgctggagtgccaggcgtcacatctgtgtttccaggcagagaaaaagaggaaagggtaaggacaaaaaggcagacctcttgtcaagtcaacccccttatgcccttatgcctagtgtttcattattggaacgctaagcatgtgggagttatagcctactgctcaaggacattgccagggtctgaatttttacttgtggaaaaattcaaaaaattgcagcctccggcataaatgcgttaaagagctttctcagaagcccggtccaactacttgcacttagtggccacacctgtgtgcaaaagaggctgggaaacgcaggtttttagctagacaaagtttttcttttccaagaatagagggcttttcttaaaaaaaaaaaaaaaaaaaaaagacgaagtactagcagctagtaccccacagcagctaggtttttttttgttgtttttttctttttctttttttttttttttttttgaggcagtctcgctctgtcgcctcgcccaggctggagtacagtggcgcgatctcagctcactgcagcctctgcctcctgggttcacgcgattctcctgcctcagcctcctgagtagctgggattacaggcgctcgctatcatgcccagctaatttttgtagttttagtagagacagggtttctccatgttggccaggctggtctcgaactcctgacctcaggtgatccacccaccttggcctcccaaagagttgggattacaggcgtgagccaccatgcccagctcacagcaactagtttttaaaaatatttaaagtaatatccttgtcaaacataacaaatgtcagttaagtcatcccacaggacactggagctccaacttggagtcagacagccctcggtttggggtatctgttccatagctgatccacgtgatacgttttacccttcagactgtgtgacaaatgaagatgattatatcaatatcacatgcacaaacagaatgacacagagattgaaaagaaagggataaaaaagaagttccaggccgggcacggtggctcacgcttgtaatcccagcactttgggaggccaaggtgggtgatcacaaggtcaggagattgagaccatcctggctaacacggtgaaaccctgtctctactaaaaatacaaaaaattagccgggcatggtggtgggcgcctgtagtcccagctactcgggaggctgaggcaggagaatggcatgaacccgggaggcagagcttgcagtgagccgagatcgcgccactgcgctccagcctgggcaacagagtgagactccgtctcaaaaaaaaaaaaaaaaaaaagaagttccagacagttgcttacaaggaaaaagccaatgaggcaatgtcagtatcacatgaaatagatgtaaaggttgaaagcaccttttagaggaactaaggaggccatttcatgtttcttaaagttcgccaagaaattctggtagttgtgaaccttcgtatacctggcaacttggtttaggggtacctagatttaaaaaatggatcaggctggctgagcgcattggctcatgcctgtaatccccgcactttgggaggcccgaggcgggcagatcacgtggggtcaggagtttaagaccagcctggccagcatggtgagaccctgtctccactaaaaaatacaaaaattagctgggcgtggtggcgggtgcctgtaatcccagctacttgggaggctgaggccggagaatcgcttgaagctggaaggcagaggttgcagtgagccgagatcgcaccatcacaatccagcctgggcgacagagtgagactctgtcccctcaaccaaaacaaaacaaaaaaaaaacgctacggggagaagtagaaaaactcacaaccatagcgggagaagtgcacagattatctctctgaagttgacagaatctagtagctgaaaaataaggatttagaggatttagataacctaatgaaaacttgattttacactgtatatgtattaactttgtacctaaccaacaaagaacacattcttttcaacctacacgtacaaatacgtacatgaaaggaatgtggatcaaataaagatcaaataagattatacattaaaatacttagttctttgttaggcaggtaggaagtactcatcctggagctttaaaaaaaaaagccgttttctttttaaaaatttctttgtagccctgaaagctgttaaagaaaaaaacgttctggccaagcacaagggctccctgaaagtgtaattccaccactttcggaggccgaggtaggatgattacttgccccaggagttagagaccagcctgggcaacatagtgagacctcaaaaaaaggttaaaaatttagccaggtgtggtggtgcatgtctgtagtcccaactgttgtggaggctgagatgggaggatcgcttcagccctagaggcagaggttgcagtgagccatgattgcaccactgcactccagcctgagtgacacagcaataccctgtctcaaaaaacaaaaactcttcaataatatttgttaaagcacagtaaagaatgtattcagaaccatcacagcaggcatagggaccactgcagcggagtctggcagtagggaagagagattgggcttaactctgaatacagcgtagtcaagtaggaatttatagccaagaagcaaggtggggatcagtgcatggaagaaactattaagaagaaatgtcagaggtaaggaagattctggctaaaccaacctaatgttgctgatgacacgccaggatgatcagacatcacctttggatggtggaagatgaagagcttgatcaggtgttgaagatgtccagatattgaggataaggttggggggcagggttcttgctaaactgacttagcgcagggttctttgttaaaactggattttacaaggaggtgcacagatgggcctaggagaagattccaaagcctgactaaagtttggccaagcaaagaatctttgtcaaagctagtaaataagtcattggtcagtgtttattgagtgcctactatatgctaggattcgcaaggagctagatatgcattgatggaaaaagcaacaacccctgtagctgcttcaggaataagctggtatttgtgatctgtagagtacaatgtttattccattctctgatcagctggagattgttgaaccccctgcagatgctgttctgatcggggtcattaattaccacacagtattttgcccttagactagcctttgatttgccaagagcatctcatgagaaccagaaccatcagttaaacattcagtgtaccagtacaatttccggtggtgggtagatgctaactttgtggacttggatcaagacagaccgctggcggatacccacacaagcatgagatacttgggttatacatcaggaagaactatttgcctggaagggttataagatagtagcatgttttagaaaaaaagaggaggcagctgtcaggtagacgagggagcaggaggtgtgtcccatgcctggctaaagcctctgttaccctaagggaaaaaacagcagtgttggccgggcacggtggctcacgcctgtaatcccagcactttgggaggccgaggtgggcagatcacaaggtcaggagatcgggaccatcatggctaacatggtgaaaccccgtctctgctaaaaatataagaaattagccaggcgcggtggcgggcgcctgtagtcccagctactcgggaggctgaggcaggagaatggagtgaacccgggaggtggagcttgcagtgagccgagatcgcgccaatgccctccagtctggacaacagtctcaaaaagaaaaaaaaagaaaaaaagcagtgttgaagttacctaggtaaagaaacatggtgagataaaggtgatgcctaggggcccctatcgtggtccctgacaggcaccaacaactggggatggtcattgccaacactcatcatgtgcgtactatgtgcctggcacggtgctgaaggctgggtccacctttaactttacggctgaaaatgctatctagcgacttggctggggccagacatctattaaggggcagagcccaggtgtgaggaggctctctagaatctttcttaacagtttcacaagggctaatccgcagttaaaccaagtggaccatttgcaaacacgggattaatcgcagtgatgctgggttgatggcatgccatgcactgtactaagtgtttcatatttgtagcttcatttttgccttcacatccactctctgaattgtgggtggcatcaaggtcctgttttctcagatgagagcgctgaggctcagaaaagttctgtggcttggcaggtggtacagtaaggtgggcttttgcctcttacagtgtctccactgggggtgtctgtgaccaggcatgaggtttgcgtgaccagcatcccacagattgcacaggaccctgcctggtcgccctgtctgcaggcctgctgggcatcagggcccctccttcccagacagctgagcctgaactcgcctgctcttccttcttagaacatgccaattacttcggcgtggatgagaagctggggccagtggctgtgagcattaagcgggagaagctggaagaccacaaggagcacggacctcagtaccagtacaggatcatcttccggacccgcgaggtaggtcccatcactctcgttcttattaaagaaatcatagccactcacatctcgagccaggttctgggggcaaacgcttccccagcttcatctcatggaatcctcccaacaaccccgggagagcaatcctgttagtctctccatctcacagaggaagaaactaagacgcagaatttaaatgacttctggccaggcatggtggctcacgcctgtaatcccagcactttgggaagcttggcgggtggctcacttgagatcaagagttcaagaccagcctgaccaacatggcgaaaccccatctctaccaaaaatacaaattagccaggtgtggtagcacgcgcctgtaatcccagctattggggagactgagccaggtgaattgcttgaacctgagaggcagaggctgcagtgagctgagtttatgccactgcactccagcctgccagcctgggtgacagagtggtgagactgtgtctcaaaaaaaaaaaaaaaaaaagaaaaaaaaaattaaatgatttctataggatcagtgaaccagtagccagaccaagatttcagtccagggtgtctgacttcagagcccaacattacaaaacctgtttgcaagagattagctctaataagcataagaaataaaagggaaggtaagggatcattttaggaacatgaggtgtcctacgtaatggaaagaattaaggcaacaagcctcaggcaggacaggaactggggactctcaaccacaggtactgctgttatgccaatcagctcaaggtactcccaatgtgtcactttccattctgagtagagaagcccatggtcctggctggaagccttcccctggattaaatgtcaactgtagctagtgaggaaggcctgttggggcacccatgctctattaggactctaaattgtaagtgacagaaatctatttctaacttgcttaagtcagaaatagcattcattggttcatgtaactgcaaatctaggggtagggcaaacttccggcatagctggacttagagactcaaatgcagtctccagaactctgcttctttaactctctgcttggctctgctttttgcatcgcgagtgtcattttcttctgccactaacaagctctcaccatgtcatgggaacatggagatgggctgctcaaatctacttctttgcactgtctcttccaaaaggctcagactggccaggcgcagtggctcactcttgtaatcccagcactttgggaggccgaggcaggcaggtcacctgaggtcaggagttcgagaccagcctggccaacatggtaaaaccccgtctctactaaaaatacaaaaattagctgggcgtggtggcaggcacctgtaatcctagctactcaggaggctgagacaggagaattgcttgaacccgggaggcagaggttgcagtgagctgagatcgcgccattgtactccagcctaggtgacaaatgcaaaactccatctcaaaaaaaaaaaaaaaaaaggcttacactgatttatctgggaagaactctggctctgctttagatcacaagcccaagtcctgagccagtcgctgtgatcaggggtggtagaggaaactgcccggtctagcatgtgttacccaccttgggtccaggggcagggccaggcactgtgattgacagttccaccagagctccctggaggaggaggcagggcagatcctcagcaaaaagaggggacccagggaagcagaaatgacagagaggcccagaagacccaaataaggaagacctttcagaaaagtggcatttgccagctaggcaggccctccaaaatgggtctccctcagcctgcattgccccagccccttgggcctggcctttgcccagacatggacgcctagcaggctgaggctgccaaggacttgactgtggggccagccaagtcctggacctcatccaggctggcagatgcagctcggagtgccctcgccccatcccctgaccaagaccttcccactgagttgggggaatgggatggcatggaggctttgcagtagccaggaagaggcagccctaaagccatgtgcgccaaaccacaggtggtcaccagcctctgtctccccagccctctcctccctctacccacctttctggccagatgagcaccagagcagaatgagaggtgacagctcacactgcatctggctgttttaggacatatgggcaactgctgggtggtgaaatgacgcctacagtcatatacttataaataggctgggtgcagcggctcacacctgtaatcccagcactttgggaggccaaggcaggtgggtcccttgagccctggagttcgagaccagcctggccaatatggtaaaaccctgtctgtactaaaaacacaaaaattagctgggtatattagtgcacacttgtagtcttagctgctcgggaggctgaggcatgagaatctcttgaacccaggaggtagaggttgtagtgagccaagatcacaccactggactccagcctgggtgacacagtgagactcggtctcaaaaatatatacatacacatatgtatatataaaatatttattatgaaggctattattactgcaaatctcctttatactgtgtgtcaggcaatattctataccttttatatctattaactcacttaaatctcatcacgattctagggtgaagaccctgttgtcctcatttacagatgacagaacaggcacagagaggttaagagacttgcccaaagcaccctccagggagtggcagggcagggtgcctgcctgtgttctggccgccgcactcggctgcctctgggttttgactaagtcagcttagactgcacactggacccactcatgagttaggagctcaaccaactcagtgctagcgtttgtgtttttgttcgtaatgaaaatacaataggcggggcgtggaggctcacgtctgtaatcccagcactttgggaggctgaggcgggtggatcacccgaggtcaggagttcgagaccagactggccaacatggcgaaaccctgtctctactacaaatacaaaaaaaaaaattagctaggcatggtagcaggtgactataatcccagcttctcaggaggctgaggcaggagaatcgcttgaacctgagaggtggaggttgcagtgagccaagatcattccattgcactccaggctgggtgacacagtgagactccatctcaaaaaaaaaaaaaaaagaaaatacaatatataggcaggcatggtggctcacacttgtaatcccagcattttggggtaagaggttaagacggaaggattgcttgaagcctggagttcaagaccagcctaggcaccatagtgatacccgtgtctctaaaaaataaaaaataccagactatagcattaggagaaatacctaatgtaaatgacaagttaatgggtgcagcaaaccaacatggcacatgtaatacctatggaacaaacctgcacgttgtgcacatgtaccctagaacttaaagtataatattaaaaaaaaaaaaacccagactatgtcacacatactgagagtcgtgagactttagtgcatggatactgggttatataattttttgctgtgatttcctgttcactaagtttgaaactggcttgatgccattcccagtgtgtacctgctcccgtccacttcccacccccagcacctacaaaactagccgtgggggactctgatccatccctgatgacagcacggggactctttgagtctcacagccacaggcctgggatccatccattccacagacatttgctcagcgttcccccgtcccagctctatgctgggcatggagggtaccgtagcaaacaaggcagcaaagatgctcgtgagactgggtgtttgagggggagacaaaaggacgcagaacaccttagcaaattatgctgtaggtgcttcccatggtgacaaggtgggggacaaagcaaggaggaatgatgagtgtggcaggtgcttagattttttttttttttttttttttcccgagacggagtctagctttgttccccaggctggagggcagtggcgtgatctctgctcaccacaagctccgcctcccaggttcacgccattctcctgcctcagcctcctgagtagctgggactacaggctcccactaccacaccctgctaattttttgtatttttagtagagacggggtttcactgtgttaggcaggatggtctcaatctcctgacctggtgatctacccgcctcagcctcccaaagtgccgggattacaggcatgagccaccacacctggcccaggtgcttagatttttaacaggaaggtcaagggaggcatcactgggaaggtaacactggagtaaacctagaggaggggagagggagccgtgtggacaactggaagaagagcattccaggcagagcgaacagccagtgcagaggtcctgaggcggagccatgctccgtgggttggagacgtcctgtgagtcctagtttgaccactcagcagttctagaaccttgggcacatggctcctttcctctcagagcctcagtttcccccttggaaattctcagcttacagaactgtgttgtgggctcggtgaggttgcacataccaagcaggcagtgggggacctgacacttgactggaagtgattatgatcggcaccactgttgcagccgatgttccttcccaggaggtcagagccccatgctgggaagcataggttgagctcacggatggggttctgtccttctcatatccacacacacacatgccttggggtcctgtaaaccagggcataggggccagagcgagaggtctgggctgccttccaagccagccagcctgccccagatggccgtccccagccgccaagcagacagtctcgagtggacctgcatctcccagcagatgggatatgagcattggcagtgccaggctccccaccaaggcaggaacagacttggagctgggctttggcactgcttgtccaaaccccagagagcctggacagggtgagcgccaggccagggctgccctgtctcaggtccctttggcactgtctcacccaggacactggggacagagtggggatggcaaccagccaggaactgtgtggcacccccccacaaggcccagtggttctcattggcctagaacacgtgatttttgacaggctttagttctgatagggttagagatttgggtttttattttattggtttttcttttttatttaaaaagtaccaaacgctcattattaagaacttagacaatacataagtatgcaaagtagaaaaaggaaagtttcattagtgaaaaaagcaagtgtgaccccgtttttgttcaataggtacatctgactgtgtgtgtgtctgtgtgtatttgcttatttatttttgagacaaggtcttactctgtcccctgggctgaagtgcaatggtgcagtcatagctcactgcagcctcgaattcccgggctcaagcgatcctcctgcctcagcctcccaagtagctgagaccacaggcatgcaccaccatgcctggctaataattttgttttatttttagagacagaatctcactatgttgcccaggctggtcttgaactcctgagctcaggtgaccctcctcctttggcttcccaaaatgccgagattacaggcatgagccactgcacctggctgtgtgtatgtttaaatgaacaatctccaaagcatattgttaagtagggggaaaagcaaaaaaatgtagcttcctgcttaaggttaaaaaatttaaaactcagctaggtgcagtggctcacacctgtaatcccagcactttgggaagctgaggcgggaagattgcttgagcccaggaatttgagaccaacctggacaacgtagcgagaccccatctctattaaaaataaattaattgccaggcgtggtagctcacgcctgtaatcccagcacttttggaggcctacgcaggtggatcacctgaggtcaggggttcgagaccagcctggtcaacatggcaaaactccatctctactaaaaatacaaaaattagctgggcatggtggcacacacctgtaatcccagctacctgtaatcccaggaggctgaggcaggagaatcacttgaacccaggaggcagaggttgcagtgagccaaaatcacaccattgcattccagcctgggcgacaagagcgaaactctgtctccaaaaacaaaataaataaaaaagaaataatatttttaaaactattaactatgcatgtggctttgtacataaacatttaacacacatctacagataataatggttaacacacattgagctctcactctgtacccaagatacagcactaagcattatgcacggatctttttgaatcctttcattgccttgaggcaggcatttttatccccattttatcaatgaggaaatagggaaattaagcgacttgcccagagtcacacagctagggaggagctagagctagaattcaaacccaggcagaccacctcctaagtaacctcctaggaaatgttcttgaagggtacacctgccgcccagcacagagtcaagcggggagtacgtctgagtcaggagtgagtggggataacctgtaccagctggaacctccttgtttgcatggtactgtgtgcctttcacagctcacttgatttgttgccctcgactagctgatgccagatgttttcaggctctgagcagaggaaggctgtgatctgactcaggcagctgtagaaagaatggactggggacagggcaggggcagggagacctggaggaggctgctgtccaggtgggaggtgatggtgggggtgaccaggtggagagtgaggtggccactcatgacctgccagtgtcccacttactgtcgccagtgctgaaggagtttttcaagtagtgcgcgccgatgaggtggtcagagccaaaatgtgactgtaagtcacccgtctccagggaggaagaaggaagatttctggtccgtgctgtccctcgttcccagcagagggcactgtgggacagtgtcagtaggatataaagacactgatcctgttggtcttaactgaaacccacaaccccagggccacccagattgacagggcaaagcccccaacatcattgcttttcatgattggttttgacactaccgtgcttgtgataagagagatttgtttgtttgttaattaccggggccagaagtgggatcattctattccttccacacatgcctctcgcccaggtgctctttggtgagggtgggttgtgtgcttagaggcgaagtcatgacatgttatttttgccacctcctgtgtttgtcgacttaggcaagcatgtttttgcagttaatacttatcctccttagtctttttgttgttgttgttgagatggagtctcactctgtcgcctaggctggagtgcagtggcacaatcttggctcactgcaacctccgcctcctgggttcaagtgattctcctgcctcagcctcctgagtaactgggattagaggcatgagccatcatgcctggctaatttttctattttagtagagacagggtttcaccacgttggccaggctggtctcgaactcctgacctaaagtgatccgcccacctcgacctctcaaagtgctgggattagaggtgtgagccaccgcacctggcctcctccttagtctttaaaccacagccccaagtgtactttgggtgcttgtaacaagccccctggagagggatttttctttgtgcgttcttggtgtggtgctggtccagtgcatggcataacctggtggccagcagcatgctgtggctacaagcatgagctggtattagtgaggatgtggagcagcaggggctctcagacagggctggtggggtgtaaattggtacaaccacttggaaaactgtttggcagttcagtaaaattgaagattagcatgcctggtgatttagcaatttctatcctaggcataaacccaaaagaaaaggtgttcgtgtgcactgaggtgcttctgtgagggttcataacagcactattcacagttggcaaatactggaagcagttctggtgctcatcaacagtgaaaaggagtaaaacgtcagcctctcgcaacagcatagctgcagctcatatatgtagcattcagagaaagaagctagataacaaaagaatacaaactgcctggctgggcgcagtggctcacacctgtaatcctggcacttcaggaggccgaggcaggaggatcacttgagcctaggagttgcagaccagcctgggcaacatagtgggactctgtctctacaaaaaatatacaaaattagccaggcatggtggcacatgcctatagtcccagctgctcaggaggctgaggcaggggatctcttgcgcccaggaggtcgaggctgcagtgaaccatgattgtgccactccattccagcctgggcaacagagttagaccctgtcttcaaaagaaaaaaagaataaaaaaatacaaactgcctgaagttcaaaaatagacagatataaatgatggtgttgaaagtcaggatagagttaattttgaggaaaaaggggtacaaatgggctgtgggtgctggaaatacatttcttgatttggatagtgattacccaggtatttgctttctgatactttctttggcctcacatctatgtgttatgtactttttttttagacggagtttcactcttgttgcccaggctggagtgcaatggcacgatctcagctcattgcaacctcctcctcctgggttcaagcgattcttctgcctcagcctcccaagtagctgggattacaggcatgcgccaccacgcccggctaatttttgtatttttagtagagacagggtttcacccatgttggtcaagctggtctcaaactcctgacctcaggtgatctgcccacctcggcctctcaaagtgctgggattacaggtgtgagccactgtgtctggcctgtatactttatatatttggatatacctcaccatacacataccaaatatatatatctcaaaacaaaccacgagcttcggagaagtcaggactgggttggaatcttggttgccattttgtcagctgtggtgaccttggataaggcacgtaacctcttggaacttcaatttgcttctctgtaaatcagagataaaacctcccttgaatagacctatacatacagttattactatagtacctggagcacagtgcagtgaactgcaccttcataaatgtgacttgttattaaggtatataagttagacatttatttggctgcaaagcgatagaaaacctgactaccagtagctaaaacaaagggaggttactttaatcatctaataagtctggacgtaggcagctgcaaggattaacttctgtgactttttgttgtctctttcctcatgattgcaatctggctgccacagctccaaacatttcattctcataccactgcccatcacacaaagaagtgggcaggtggaaaggggctttcattttttttttttttttttttttgagacagtctcgctctgtcacccgggctggagtgcaatggcacaatcttggctcactgcaacctccgcctcccaggttcaagcaattctcctgccacagcctcctgagtagctgagattacaggcatgcaccaccaggcccagctaatttttgtatttttaatggagacagggttttgccatgttggccaggctggtctcaaactcctgacctcaagtggtccgcccgcctcggcctcccaaagggggctttccttttattagagggaaatctgccccagaagtcctcaccaagcacaattctcctcatatctcattgcctggaattgatcacatggttgcctataggaaaaacttgggaagcaacatctggggaatgggaatgagatggctgtgattggctttgactaaaggttttcatccctgactgcacatcagaagcacctgagaaggattaaaaatatgccatgtatgcaaacatgcatgtctggccccatcccagaccaaccaaattagaatcactggtggtgtcttgtcttgtcttgtccttttcttttcttttcccttctcttctcttctctctttcctaccctccctcctttcttttcttctcttctcttcttcttttcttttcttttctcagactgagtgttgctctgttgcccagactggagtgcagtggcgcgatcttggctcactgcaacctccgcctcctgggttcaagtgattcttctgcctcagcctcccaagtagctgggattacaggtgcatgccaccatgcctggctaatttttatatttttagtagagatggggtttcaccatgttggccagggtggtcttgaactcctgacctcaagtgatccgcccaccttggcctccccaaagtgctggggttacaggtgtgagccacccacgcctggcctttttttttttttttaaatgaaactggtctgaaaccagtgccacagttcaagatccaagatgatgccagtattcaaggcaggtgggtgttttacttgagcatttacagtaatgtgtacataatacagtgttactgtaataatgacaagagcccacctcctggtaggacctgttttcttcattatactccctactgccttacataattcatctcccccattccagtgtcagctccacaaggacaagggtctttgttcattgcacctagagtaggactcagtgcctcacaggaggcactcagccagtatatgttgaacaaatgaaggtagtttacattattgtctcatttaatcctcccaacaccccttcaaggttacgataccatcctgtacccatttcacaaaagagcaagctgaggctcagagatatgaagtcacttggtcaagaccgcacagccaggaggcagcaggttcaagttctggctcagacttagggctttctgaccttagagcacaaacttccaatcatcacacatgtctctttcaaaacaagatacctctgctatgctcttatccctttttaggtctcgagagccccctaaccttcccttctctcccttgagtagctcatcaccctgcggggctccatcctggaagatgctacgcccacagccaccaagcatgggaccgggcggggcctgcccttgaaggatgccctggagtatgtcatccccgagctcaacatccactgcctgcggctggccctcaacacccccaaggtgacggagcaactgctgaagctcgatgagcaaggggtgagtcaggggctggaggtgggggtgctgctggggcagtaccttgcaaccccactcctggtagctttttctatcttggtcactttcttttttctttgcaagtaacagaaacctacttaagctggtttcagcaaaaggagggattcaaatcaaattctagtggtgccaagagcaagaatgtaactgggtctcctaaaggagggagattgtctgggggtgagatagctgctaggtccccatgtgtgcatgcatatatgtgtctatagtggggggttagtgtgtctttcctccccgctccacatgctggctccctctgcttctcttgcctctcccacagctcccagtctgttagaattacagccacatgcagaccccagcaggctgaccctggtcacaggagagccatcgattgggctatggcgtaggtcaggtggctgtccatggcccagtcaccagtgaccagggggatccgggatacctaaagcaaacatagttattgggagcccactccctaaaaaaggtattgactataagccttgagccctccagattttgcttttgcagaatctcagcccatcccagtccacctactgtgggatgccggccaaggcaacagtctctttcatgcaagtgtggcatcaccagccgtcctccacccgccatagcgagaagaggcggcctggatacctcgttgtgcttctctggagtggaagggagggggagggacaactgggacatgctgccatgccccaacactgttttcccctgtctggctatggctctgggttcccgagtggtcccagcagctcccagggcctcaggcctcagacataccccttgctcccttccctctgccatctctgcctggcctgcctccacaaagccactcttgcctctgcagctctgccggaagcacaaggtgggcatcctctattgcaaggccggccagagctccgaggaggagatgtacaacaatgaggaggccggccccgcctttgaggagttcctctccctcatcggcgagaaggtctgcctgaagggcttcaccaagtacgctgcccagctggacgtcaagagtaagtagggggccggttagatcacagtgagccaccactgcactcctactcaacaggcaaagcttaaaaggcctggggatgccacggtggggacgtggagcagtgggagctctcagacttcacttgtaggagcacaaataagtgcagccactttattttttcgtgttgttgtacttgttgttgttgttgttgttgtttttgagacagagtctcactctgtggcccaggctggagtgcagtggcatgatcccatctcactgcaacctctacctcccaggttcaagcaagattctcctgcctcagcctcccaactagctgtgactacaggtgtgcaccaccacacttggctaatttttgtatttttagtagagacaggctttcaccgtgttggccagactggtctcgaactcctgacctcaagtgatccacccacctcagcctctcaaagtgttgggattacaggcatgagccaccacgcctggccatgtgcagccactttggaaaacagtacagcacattcaagtccagtttgaagagacgctgctctgtgactcagctcctgcactcctaggtatgcactctgtctaatgtgcacgtgcatggcaggagaggactgaatatccctaaccaccggcacctcggtgcacccagtgcacactggcagagttgcgccgtgttcacccagaggagatgaactggcaccacaggcatcagcgtggaagagagccacatgcttcgtgctgcgcaaagacagcaagcctcagaagagtgggacctgaatgatgtcttttacataacaatttttttcttttcttttcttttctttttttttttttttttgaaacagtctgcctctattgcctaggctggagtgcagtggcgcaatctcagctcactgcaacctccgcctcctaggttcaaggagttctcctgcctcagcgtcccaagtaactgggattacaggcatgagccatcactccctgctagtttttgtatttttagtagagatggggatttactatattggccaggttggtcttgaactgctgacctcgtgatctgcccacctcggcctcccaaagtgctgagattacaggcgtgagccaccacacctggccaattattattttttatagagacaaggtcttgctatgttacccagactggtctcaaacacaaggcctccagggatccttggcctcccaaagtgctggaactacacacatgagccactacacctggcaaaaaggtccagcaggatgactcacacctgtaatcccaacattttgggaggccaaggaaggaggattgctttaggccaggtgttcaagaccagcttgggcaaaaaagcaagaccctgtctctgaaaaaaaaaaaaaaaaaaaagcaaaaacaaaaacccagcaatatattgttggtggatatgctcttacacagtggaactctaaagaaaaacagagccaagcgtggtggctcatgcctgtgatcccagcactttgggaggctgaggcgggtggattgcttgagcctgggagtttgagactgcagtgagctatgatcatgccactacactccagcccggatgacaaagcaaggccccatctcaagaataaataggccgggcatggtggctcatgcctgtaatcccagcactttgtgaggccgaggcgggtggatcacctgaggtcaggagttcgagaccagcctggccaaaatggtgaaaccccatctctactaaaaatacaaaaaaattagctgggcgtggtggttcacgcctataatcccagctacttgggaggctgaggcgaatcgcttgaacccgggaggcagaggttgcagtgagccaagaccgcaccattgcactccagcctgggcaacagagcaagactccgtctcaatcaatcagtagaaaaaaaaaaaaaacaagggaatactggagacaatatgcaggatagtggttggctgtctggggagaggtgggtgtgtctaggaaacggtgctcacgttagagtgtgggtagtggtctttttcttaaggtggtatcacataggacgtatttgttgcagcagtctctgtgcttatcatgtgtatgtgtacataaatatatatgatatatggggctgggcgcaatggcccacgcctgtaatctcaacactttgggaggctgaggcaggtggatcacctgagggcaggagttcgagaccagcctggccaacgtagtgaaaccccgtctctactaaaaatacaaaaatgtaaccaggtgtggtggcacatgcctgtaatctcagctacttgggaagctgaggcaggagaattgcttgagcctgggaggcagaggttgcagtgagctgagatcacaccactgtactcgagcctgggcaacaagagcaaaacttcatctcaaaaaaaaaaaaggggccgggcgcggtggttcacgcctgtaatcttagcacttgggaggccaaggtgggcggatcatgaggtcaggagatcgagaccatcctggctaacagggtgaaacaccgtctctactaaaatacaggcgagcgcctgtagtcccagctactctggaggctgaggcaggagaatggcgtgaacccgcaaggtggagcttgcaatgagccgagatcgcaccaccgcactccagcctgggcgatacagcgagactccatatcaaaaaaaaaaaaaaaaaaaaggaaagaaaaaaatatatatatgtatatgatatataggattgaaatgtttcatgagaagtagctgggtgggtggatgggtaatgttcacaggtgtcacagctccctggggaatggactaccactgtccttgggagtgggttttcgtcagctgggagtgagaaggccccaagatggctcagtcagacattgctcttccccacacctcgccaagactcggtttgctcttctagaaaacaaaacagaagcccagatcaggagacaaatcttagagagagaagtgaggtgttaggcaggtgtctggggccatcatcaccttcccctgctcctccgctgaaggaggctgtaggaggaacgagcatgttattatgccatttgctagtttcgtgatcttggacaggtggctttgcctctctcgacctcagtttcctcatctgtagagtgaaggtaataattgcgcttatcttggaagcatggtgagggttccgtgggtcagctttgccccaaacatcctgagccctccctctgtgccgagtgcttcccagagctccgccagcgtgggtgtccccctaggtgggcggggaggcagcaggcctccctgggctcacctggcgtggaggaagctggcaggtgtgagtgttagtattggtttttttgtttttttgtttttttgagacagtctcgctctgtcacccaggctggagtgcattagaacgatcttggctcactgcaaccttcacctcctggtttcaagggactctcccacctcagcctcctgaatagctaggattacaagcacgtgccaccagacccaactaattgtgtacttttagtagagatggggtttcaccgtgttggccaagctggtcttgaactcctgacctcaggtgatccacccacctcggcctcccaaagtgctaggattacaggtgtgagccaccgcgcctggccaggaagtgggttctcttagaggaccccaggaagcatagtgctcctggaatgagtttccccaaattacaggcaagaatggccctggcttgagcagatacctgggtgttacccggctcccaacctggctctggcactggcagctgtggcctcagtgtccccgccagacactgaggcagcattgaatattattaagaacagatctggaggccaggcacagtggctcacgcctgtaatcccagcactttgggaggctgaggcaggtggatcacctgaggtcaggggttcaaccagcctgggcaatgtggtgaaaccccatctctactaaaaatactaaaattactaaaattatccaggcatggtggcaggcacctgtaatcccagctactcaggaggctgaagcaggagaattgcttgaacccaggaggcagaggttgcagagagcccacattgcgccattgctctccagcctaggtgacagagtgaaactctgtctcaaaaaaaaaaaaaagaacagatctggaatccaacagcctgagtactggtccagacgctaccactcagtacagtgtgaccttgggaaggcactccctctccatgcctcagtttcccactctgaaacatgggctcagtaagcaggtttgcctcttcctagccataaccctccctcctattagagagaactcatatcctgatgctcaatgataaccatttctttgcttttcttcatagttttgctacttacctacacatccctgactggtataatctgacctgcttttgcatgtcacatgaatgggatcacactgtgtgtgctgctttgtgtcagcatctttcactcaacatttagaggatttccccatgctgcagccgcgactcattccttttcctggctgtatatttttccacagtgtgaattgaccagtgtgttcacccattcttttgactgacgcttgaagattcttgtacccatatcccaggacacgtgtgcatgatttctctgggctgtggtccaaggaaaggaagtgccaggttatcaattaagcctatcttcaggtataagagagattgctaaaaagttttccaaagtgcttgtaccaagttacacacctaaccagccacctcaagggttccatttgctccacatcctcgccaaccattggtgctgtcagactttttaatttttaccagtctggtgggtacatagcaatggggtttcctttttatctaaatgtatttaattttttttttttttttgagacagagtctaaccctgtctcccaggctggagtgcagtggcgtgatctcggctcgctgcaacctccgcctcccgggttcaagcgattctcctgcctcagcctcccgagtagctgggactacaggcacccgccaccaggcctggctaatttttgtgcttttagtagagacggggtttcaccatgttggccaggctggtctcgaactcctgacctcagatgatccacctgcctcagcctcccaaagtgctgggattataggtgtgaaccaccaggcctggccagtgtatttaatttttaagagtagattgaagtgaaagcaccaagttaaaaaccagcacagatggtacgtgggatatggcaaaaacccagaggttttggaaacatggtcctaactggcatttctgtttcagccgactccacgggaacccactccctctacacgatgtaccaggactacgagatcatgttccatgtctccaccctgctcccttacacccccaacaacaggcagcaggtcagtgattttcagcagaggcacggctgccggatgttggctgcccacccaccagcattggccctcccagttctgtcctgtggatcatatggaggcccttgaccttggaggccatctttactatggtcactttccctgggggttagagagcagcccaggtgtggttcgagatgtcactttggccccagtctttcctgctgcttcttgggcgccctgcccagccccagctagcccgacgcccctccagggcctcttgagtcatcactggtcttaagaagaagagtgaatcagtcaacattattttgactgcaagtaacagaaactcacaccaaactggcttaactagaaaaagagatttatgggttatataactctaagattgtagagagggctggcctcaggtctggttggatccagggactccaacaatattaggaatccttccccatttctcacctccacttttctttacagcagctttattcacaggtgcaaagcaaagatacctcctagcagccctaggctcacatccaccagcttagccacctcagcagaaagagtgctgttttttccagttgtcccagaagtgtttcagagctgagtctcattggactattcacatgccagtcttggggcctggggtaggggtggaaagggcagactggccaagcccgaggctcatgcccaaccctagagagggtgagtggtgccagctcaacttgaaacggatggaggttggggaggtgctttcctgaactgggtgggtgtggctgccagcaggaggcagggataccaggtgggcagcgccaccaaacactcattgccaagaggctgcagctgtgacccggctcctctcttggacccaccttgcaggctgggcccacagagcaattcttccagttcctaatgaacagaagccccagagtgctgacagtttaggaagtaagtgtacgtattttcccagttggcacaagtgactttgtaggccaaaaatgctcaaatattgatttcctaaggttcatctaaaaacatgctattaagagctttggtcttaggccaggcttggtggctcatgcctgtgatcccagcactttgggaggctgaggcaggcggatcacctgaggtcgggagtttgagaccagccaggccaatatggtgaaaccccatctttactaaaaatacaaaaattagctaggcatggtggcgtgtgcctatagtcccagctactcaggaagctgaggcatgagaattgcttgaacccaagaggcagtggttgcagtgagctgagatcatgccattgcactccagcctgggcaacagagcaagactctgtctcaaaagagaaaaaaaagcaaaaaaaaaaagcgctttgatctcagaattagacctgaatttgagttctttcttggctacttcctagctgtgtgatctcaggtaagtgatctcacctctctgggccttgagtccctgctgtgtaaaatgggtataatcgtagtgcccctgaatcagggtcattgagaaaggtccatatactcctgcggcaaccggagcgtgacagggcccgacacacaggaggggcgcagagagcagtgccttttcctgagtatgtgggaggggcgctggggaaaagcttgagtcgtagagttaagaagtgggttagaatccaggctctttccctccatcactatgtgacttaggtaaaattacttaacctctgtgagcctaagttttctcatctgtaaaatggggcaaaatgagttaacgcctctcggggttgttaagagattcattgagatgatgaattgaagataaggctgtgcagtgtttagtacaggaccagccacagtcaatagctgctttagcgatttgatttaatgccacttaaaactcacataaagaactaaccattcaacagtaggagttgagctgcaaagcgtgtctggagttcacactgtgagccatgtcacttagagctccgtgggactcccgtccatggatctcctgcattggcagattctttaacagctacatgaatgctagaactgtgtaaataagaacaatataataggctgggcttggtggctcacacctgtaatcccagcactttgggaggctgaggcggagagatcacctgaggtcaggagttcgaggccatcctgaccaacatggagaaaccctgtctctactaaaaatacaaaattaactgggcgtggtggcgcatgcctgtaatcccagctactcaggaggctgaggcaggagaatcacttgaacccaggaggtgcaggttgcagtgagccgagatcgcaccattgcactccagcctgggcaacaagagtgaaactcagtctccaaaaaaaaaagaaaaaagaaaaagaacaatataatctcagcaaataagccaaacactgtgaatacggcgtcacctgtgaagataacagagtcttcctcggagactgaccagcaggggagaggtgtattagtccattttcacactgctaatgaagatttacccaagactgggtagtttataaagaaaaagaggttaaatggactcacagctccacatggctggggaggcctcacagtcatggcagaaggcaaagaagaaccaaaatcacatcttccatggtggcaggcaagagagcttgtgcaggggaaccacacttttataaaaccatcagatctcgtgaaacttatttactatcacgagaacagcatggaaaagacccacccctatgattcagttacctcccaccaggtccttcccacgacatgtgggaattatgggagctgcaattcaagatgaattgtagggtgtggacacagccaaaccatatcagagggtgagagtcccatagggcactcggaagccacagccatcctgacctcagtcagggtccagggaaggggtggcgcctataactggccctgccagtgacctgggatctgactctgccattgtccatgggtgtggctttgagcaagttgaagaccaccagcctgtgctctctggatcttacttattgagtacctcctgtatgccaggcactgtgctgggtactgaggatacagcagttggccgtgaacaaaatccctgttctcatggagctgccacttcaatgggaagagacaagaaacaaaatgaagtggggaaagccatctctgctgagtgtcaataagtgttaagtaatggggacagaaaagcaaagatcagggagtgttgtggtggggtggatctgaataacgtagtcagcaaaggcctccctgggagggtgaggtttatgcaagaccagaagaggtgacgaaggaagccatgtggggactcaggaagaatgttcctagcagagggaacagcggtgcagaggcttcgaggaagtgtttctggccatggtgaggcctttgtcctttatcctgaatgagagggaaccacaggaaggtttgtcacctgactcgggcattccttgggctgtgtgtgagcagggagtgggaatgggggtgggtggggggagctgtggcagtggtccaggcaggacccgtcaggccgacctgtgacaggttcctgtccccctctgttgccctttcccagctgctacggaagaggcacataggaaatgacatcgtgacgatcatcttccaggagcctggcgcgctaccgttcacccccaagaacatccgctcccacttccagcacgtcttcatcattgtccgagtccacaacccctgcactgataacgtctgttacaggtatgccccccacacccggcccccagcagcgtatggagagaggggcaggcagctggcccaagtgggtcccagtacagggcccccccacacctcacgttgtgcttcaggagaagagctcggcgtatactccccacaccatctcagagagtggtttttagccagaaaggggcatggctccccacttttgctaaggaaaccatcagggatttgtatttgcttgtaatcttttgtttcaagtgacagaaaacccatgtcaatgtggcttaagacaaaaagacagttgtgtatataggctctcaaaagtggcacctttaggcctggctggatctgccaccgccctcctgggggtcacctttccagcaggtctgaggtgaacatcctaccagctgcaaatcccccaaaatgagagcttttctttcccaagagttgcatcagaagccccagaattggggctcactggcccagttggagtcgtgtgcctgtcctagagccaaaatcaccagccaggcctgggcactgggcttcaaggaccaagaggcacgagtgatggcccagaggaaagtcggagggaagcagggcctacctgtggaggtaggccccactttggaggtagaattgaggaggtttttgttgttttgggtttttttttttttttttaagacagggtctcactctgtcacccaggctggaatgcagtggtgcagtcatagctcactgcagccttgacccccccgggctcaaacgatcctcctgcctcagcctcctgagtagctggaactacaggtgcacacccccatgcctggctaattaaaaaaaaatttttttttagtagagatggggtctctctgttttacccaggctggtcttgaactcttggcctcaagtgatcttccagcctcagcctcccaaagtgctgggattgtaagtgtgagccaccgcacacagctgagatcttttcgtacctgtacatgaagtgctttttgttctttctgatacttcatattccattgtatggatgtggagtcatctcctgtcctctactgatgggtattacggttgtgatgcctgcaatgaacagtcttatttatagtctgattgcgcctgagtccaagcatacagctgtaaaagaaattctagaaatggaggtgctggagcagaggacgtgtgtatgtgcaccagtagtcaccgcgaaattaccgcgggtctaccagctgcctccctcggctgggtgagggaagggaggggcatcccagcctgcagcgctggttgtctagcacctctgtgctgcacatgttgcccgctggctactgggagccagcacactgcatggcagggcctccttacaggcatgtccctggacctgaggccacctctccccctgcccatcggttcctggaacatgcagcagcagctacagagtgcctgcacctcaggccctttttggggttgaggacccttggatgagatgggagatatttacacacatgcacacgcacacgtgcacaggcacatgcacacacacacatgcatgcacgcatccgtgcacacatgcacatgcacacacatacatgcacacacgtacatgcacacacatgcacacaggcacacacctgcacacaggcacacacatgcacacacacgtatgcacacaccatgcgtccacacatgcacacacacgtatgcacacaccatgcgtccgcacatgcacacacctacatgcacacacatacatgcacacacatacaggtacacacctgcacacaggcacatgcatccacacacatgcacatgcacacacatacatgcactcacacaggcacgcataaacacatgcacataacacatgcacacacctgcactcacacaggcacacacaagcacatgcacatatgcacacacatatgcacacatacatgcacacgcacacatacacacatgcacacactggaaaaggaggcagccttcttatgatgcatcagaggtggagggttgagctggtggggggagctgctttctcttcttcgtccccactctgacctcccctctcctactggggtcatcacatcagcctgcagctgacctccctcccttccgggctcgcctctgcatggtctccagagtgatttcttctctctcacacacaaacctttcttgttttttataatttaatttaaaatatttttattatgcaatattttaaccattctgaaaaatgcagaaaatcatttaacagagacccatgtgcccaccgccagctttaacagatgttaacattttgctttgtttgcttcggctctccctctttccttcatttttaaagaaagaaaatgttagagatacaaccaaagctgctcctcagccatccccctcccttcccatccctctttccccacaggcagctcctctctggacagacctgaccctgcctctaccctgtggagggagcccggacacagctctccagcttaccatctcctgaaacccccaactcctgtcccccaactcagtgaatttctaattgtccttcaagactgaactcagggcgaggtgcagtggctcacgcttgtaatcccagcactttgggaggctgaggtaggcagatcacctgaggtcaggagttggagaccagcctggccaacatggtgaaaccccatctctactaaaaatacaaaagttagccaggtgtggtggcaggtgcctgtaattacagctgttcctctggaggttgaggcaagagaatcgcttgaacccaggaggcagaggttgcagtgagccaagattgcaccactgcactccagcctgggctacagagcgagactccatctcaattaaagaaaaaaaaaaaaagactgaactcagatgagcctctgacaccctccagtggttccttacctgctccatgtgccattgcccaacatgtttctgtcatagcacacatgacaccataaaaatgatatgatgggctgggcatagtggctcacgcctataatcccagcactttgggaggctgaggcaggaggatcacttgagcctgggagttcaagatcagcctggacaacatagggagaccctatctctaaaaaaacaatttacaagttagccaggcatgctggcacgcacccataatcccagctgaggtgggaggatcgcttgagcccaggaagtcaaggctagagtgagccccattgcactccagcctgggtgacagagcaagactctctcaaaaaaaaaaaccaaaaaaaacggaaaaacagacatcacgtggctgttgcctcctttgacagtaaccccatttcatgtttagcttcctgtatctgtcacagcacagagcttggcacatagtgggccctaaagccatctttgcttggctggaaagacacctggcccaaatgttgcaggcactgaaaaaataattgttgaataaataattctgagtgttctagcaacgcttcttgccctctggtgatcaggtgaccaccaggtcccctcgtctgctggttgtttcgtgagttttcatcctttctgtttcaagtgtgcaatttccgaatggccacccgcatcatccctgcagcctgtggactctcaaaacccagtccctcctgctgggaagtaagggaccagctgttctgatggctcaaaaaccttcagccgtttgcaattttatgatttgtgaaatcatgaatcaggaatataggaaaagcctaaatctgtcactataagcagctaagtgctgaataaagaagttacaaagctcggctgggtgctgtggctcatgcctgtaatcccagcactttgggaggccaaggtaggtggatcacctgagatcgggagttcaagaccagcctgaccaacatggagaagccccatctctactaaaaaatatataaaattagccagtcatggtggcacatgcctgtaatcccagctactcaggaggctgaggcaggagaatcgcttgaacccaggaggtagaggttgcagtgagccgagatcatgccattgcactccagcctgggcgacaagagcgaaactcttgtctcaaaaaaaaaaaaaaaaaaaaattgcaaagctcttcatctctgtaaagtgcaatctgacaatctgactgccccattcagtagagagagggacaggggaggtcatctcatccatccccctgcctggggtaaggccatgtccacaagatttcccacagaagaaaatttacctggtgtgtgtggcattctttgaagcatgtccgctctggaaaatgcctttttctgttaaaactatgcccaccataccttggtagaaacctgtttcgtctgtccatgtttaaaccattactttagtcagcattgagcaactgtgctggggaatccactaagcctagggcggcatccagccacgtggcactcctggggcatgaaggatcactagccagtcaacgccagagatggagagcgagggggatctggcctgatcggccggggtcgcgcagtagctcccacactggtctcctgcatgtgccctgtcctcccgtccattcttcatgaggcagccacagtggtctccgcagattgccaatctgttgtccctctgccagcacctgcctctgttgggaacccagcgagaagcagatctccctcaaggatttaaccaaagggagttgatgccactgacagaggtgtggggagcttacgggaaccatgtgggaagatgctgcatccagggactagccagagcaggaacctttatccacccccaagccttgatgggctcagagggagacgggagatgtttctgaaagctgatgagagctgtggccctgggagaggggcggcccaacaggagcagtagctgtaagggaccaaagatgacagccactgacagtttcatcacagcccctcacagtggaagggaagagaaataaatactccagcctctctcctcccaccttcccattccctgctggtgcttctcattggccaaactcagctggaagccccagggcacaggaacccaggtgacagagctagagagatcttccttcctgagcacagagcagggcagagaacggcagaatggatcagagggggcagacaggaaatggtttcaccaccagatcagatcattaaatggttgcctgctcccatggtaaggataggaagtgctaactcaccagggccccgtgtggccttgcccctggtgacctcatggcctcctgctccttgccttccgggccatgcccaccctggccttccctagtcggctgctacctgtgctgcaccccctggctgcagcactctcccccagctcttcctctggttccactcagcccttagatcccagcttcatcatcacttgctcagagaggccctcccagattctccctgtccaaatcaggtctttctctagttctgtcataacatgccctgttccctttcctcatctttatgagtttatctctgtgtgttgatttggtatgtcccttctcctggactagaagctctgggaaggcagggaccacgttatccccaatgcctaagagcgtggagtccaggaagtgcttgtcaaacaaatggatgagtgtcgcactgtcgcccttgtctagagttgggggtaaggggagggaatcaacaaaacctgggcaagcatgactttgggttggagtttcatggagtgtttttaatccataatctctatttttttaaattatcctacagatggaagagaaacagtaggaattctgtcttgacactgtactgacaaataggttttaatcaaggatgaaaataccatacatttttaggaaagcatagttaacttattgcatcaccctgtgccattaagaaacataaagagaccgggtgcagtggctcacacctgtaatcccagcactttggaagtccgaggcgggcggatcatgaggtcaggagttcaagaccagcctgaccaacatggtgaaaccctgtctctactaaaaatacaaaaattagccaggcgtggtggtgcatgcctgtaatcccagctactcaggaggctgaggcaggagaatcccttgaacccaagatgcttgaacccaggaggcagaggttgcagtgagccgagatcgcgccactgcaatctagccagggcaacagagcagcaagactctgtctcaaaaaaaaaaaaaaaagaaagaaagaaaagaaaaagaacaggctgggtgcggtggctcacacctgtaatgccagcactttgggaggccaaggcgggcagatcacttgaggccaggaattcgagaccagcctggccaacatagtgaaaccccatccccatctctaccaaaaatacaaaaattagccaggcatggtggtgcacgcctgtaatcccagttaccccagagactgaggtgggagaattgactgaacccgggaggtggaggctgcagtgagctgagatcacgccactgcactccagcctgggcgacagagcgaggctccatctcaaaaaataataataatagaagaaacatgaagaacataactcacctgccctgggtgaatattctggcaggtgccttggcctttttgtgcacttttagcaataatctgccaaaaggccactgagcctctatttaatttggtcatcagagcatcacatccaagatattcatcaaatctccaaatgtgactcatcaacagatcttctccctgtccgggctcagggctccttccgcccagaagcctcgatgggttgagagcctggttacctctcctgcttctgcaccttgcacttctcctcctcccagccctgctcactgccagtttctgacccatccagggttggagtgtagggaggaaaagggaggcagggaagtgccatgtggactgtggctggagctggctggctgctcgccgggctcttcaggggcttcctgcacaggcaggagacagatcccagtccgctcgctgctataaggatcacctaggggctgggcgcagtggttcatgcctgtaatcccagcactttgggaggccagggtgggtagatcacttgaggtcagtagttcaagaccagcctgaccaacatggcgaaaccctgtctctactaaaaatacaaaattagccaggcgttgtagcaggtgcctgtaatcccagctacttgggaggatgaggcaggagaattgcttgaccccgggaggcggaggttgtggtgagccgagattgtgccattgtactccagcctgagctacagagtgatactccatctcagaaaaaaaaaaaagagcattacctatggggtccctcctgctgcggggtggggaagggagagaatggggctcacccaccagctttctccacaagttccttttctctctccatagtttaaatagtgggaaatgtggtataagagcttgggggaacagagtcttcagatcattttctctttttttttgacacagggtctctctctgttgcccagcctggagtgcagtggcacattcttggctcactgcaacctccgcctcctagattcaagtgattctcctgcctcagcctcccgagtagctgggactacaggcctgtgccaccacacccagcctcattttctctttacgctctcctgagttgctatcagattttgatagcgcctccatcaaaacttcctgttacaatgaacttcctttattaattttttttcttctttaaacctcagcatctaccagaggaatgcaatgaattttcaaaataacctttgttaagatgacttacaaggtatacttgtgtaacacaagtgttcaaaagaactaaaactcataaacattctacatcagtcagctattcctacaataaagccgtataacaaaccacccaagggctcagtgacaaacgttaatgtttctttctggcttacaaaaaatacaaaattacccaggcgtggtggtgggcgcctgtaatcccagctactggggaggcagagacaggagaatcgcctgaacccaggagacagaggttgctgtgagccgagattgcgccactgccctgagggagtaggtttttgccaaactgtaagatctgccacacggtctatgtatttaaaacaggaataagtgaacagtccttggaggattaccctttgatgtcagaggatgttcagacatctgctttatagaaaatgtgtatgtgccctaacacttttttttttgagacagtctcgatctgtgccccaggctggagtgcagtggcgccatcttggctcactgcaacctccgcctcccaggttcacgccgttctcctgtctcagcctcccaagtagctgggactacaggcacccaccaccacgcccagctaatttttgtatttttagtacagacggggctttaccatattggtcaggctggtctcgaactcctgacctcaggtgatctgcccgcctcagcctcccaaagtgctgggattacaggtatgagccactgcgcccagccgactttttattagatttcgaatctggttagccagcaacttactaattagatgtggactttcattcttcagaaggaaactggccgcgtgtggtggctcacagctgtaatcccaacactttgggaagcccaggaggtaggatggcttgagcccaggagtttgagaccagcctgggcaacatagtgagacctcgtctctacaaaaaataaacaaaattggctgggcatggtggtataagcctgtagtcccagctacttgggaggctgaggcaggaggattgcttgaggacaggaggtcaaagctgcagtgcgctatgattgcaccattgcactccagcctgggtgacagagtgagacctgtctcgataaaacaaacaaacaaaaaaccctattcctattttttgatcgaatattttctctctgaagtgtcttagtgcctttcttcccaccatctaaataatctctccctccacagtatggctgtgacccgatccaaagacgctcctcctttcggcccccccatccccagtggaaccacattccgcaaatccgacgtcttcagagacttcttgctggccaaggtgattaacgctgagaacgccgcgcacaagtccgacaagttccacaccatggccaccaggacccgccaggagtatctcaaggacctggccgaaaactgtgtctccaacacccccatcgactccaccggcaaattcaacctcatctccctgacctccaagaagaaggaaaagacaaaagcacgggctggcgctgagcagcacagtgcaggggccatcgcctggagggtggtggcccaggactacgcccagggggtggaaatcgactgcattttgggaatttccaatgagtttgtggtgctcctggacttacgcaccaaggaggtggtgttcaactgctactgcggggatgtcattggctggactccagactcctccacactcaaaatcttctatggacgaggagaccacatcttcctacaggcgacagagggttctgtggaggacataagggagatagtgcagagactgaaggtaagggagagagcccggcgatagggcggcgatttgtatggtttcggcctcaggaaccactgaaatacttccctagcccagtcagttaggctaagacacgcactggcccggagagaatcacagttgtcacttacaaactagacatcttgtgggttctgtagctaggttcttcctctggaaggtttgtgccagagatctgtggatcttcatgctattaccttggaaagacaagagatacttattaaccttggacactgatagaaagtataaatttaagcttaggttaaaaatgtaggccaggcgccatggctcatacctgtaatctatctcagcactttaggaggctgaggtggtggatcgcttgagcccaggaatttccagaccaacctgggtaaccatagtgagactctgcctacaaaaaaaaaaaaaagaaaagaaaattagggaagcatggtggtacatgcctgtggtcccagctacttgggaggctgaggtgggaggattgtttgagcccaagaggttgaggccacagtgagctgagatgacgccactgcacttcagcctgggcaacagtatgagaccctgtctcaaaaacaaacaaaaaaaaagaagtgtaagagtactttctaaaataattaaaatagaatgaaaaatgtccaaaccattaatggatagggcagaggtgagaggaggaaaaaatacaagaaagcacaaaggaacataaaattacatggcaggaatgagttccatgttagtaatcacagtaaatgtgaatggtttaacttgccctattaaaagacaaagactcacagtctaggtagaaatcttcccctaaacccctcgtggacaaaccaagagtggcagattggtgatagcttagctgctgtctgcctgaagcattgtgctgagaagtactcaggccccatctaagctccacaagaaagaacactgtggtcagtgattgcctctgcagtgggtttggcagaacgccgtgccatgtgtgctaaatagagatagcatataacacggcagttcagagcacaagatctagtcagaaggcctggcttcaagtcccagcactgccacttaccagctgcatgaccttgagccaagttatttagcttctttgtgattcagtttcttcatctgaaaagcaggtacaagaatcattctgcattgctgggtgcagtggctcatgcctataatcccaacactttgggaggccgaggagaaaggattgcttgagcccaggagtttgagaccagcctgggcaatacagtgagatgccgtttctaaaaaaaaaataaaaaaataaattagccgaggcaggtagatcatgaggtcaggagatcaagaccatcctggctaatacggtgaaaccccatctctactaaaaatacaaaaaattagccaggcatggtggtgggcgcctgtagtcccggctacttgggaggctgaggcaggagaatggtgtgaacccggaaggcgaggcttgcagtgagctgagatcacgccactgcgctccagcctgggtgacagtgctagactctgtctcaaaaaataaaaataaaaaataggccgggcgtggtggctcacgcctgtaatcccagcactttgggaggccgaggtgggcagatcacaaggtcaggagattgagaccatcctggctaacacagtgaaaccccgtctctattaaaaatacaaaaattagccaggcatggtggcgggtgcctgtagtcccagctactcgggaggctgaggcaggagaatggcgtgaacctgggaggcggaggttgcagtgagccgagaccctgccactgcactccagcttgggtgacagagcgagactccgtctcaaaaaaaaataaataaacaaacaaaaaataaattagctgggcatggtggtgcacacttgtggcctcaactattcaggaggctgagtgggatgatcacttgagcccaggagtttgaggctgcagtgagctatgatcacaccactgcactcgaacctcggcaacagagaaagacccggactcaaaaaaaaaaatgaaaaagtggccaggcgcggtggctcacacctgtaatcccagcacttggggaggccgaggtggatggattatttcaggtcaggggttcaagaccagcctggccaacatggtaaaacctcatctctactaaaaatacaaaaattagccaggcgtggtggcacacacctgtaatcccagctactcgggaggccgagggaaaagaattgcttgaatccgagaggcagaggttgcagtgagctgagagtgagccactgcactccaacgtgggtgacagagcaaaactctgtctcaaaaaaacaaacaaaagcaaactcctgtgttcctccccacccctctcagaggtttcctgactttgtaaaatagaagtcctctactcaaataaggttttagggaaaaaaaggtcgactccatccctccatttgcggatgtcagagctttggcatcagcctgggctccactctctctcatgcccacattcgtcagctccacttctgtaggcaggcatcagccacctctcccagagccctcaccctggagcgagccaccctggtctctcccggacactttcgatggtgtcctttctggtccttcttacccctgcccttgcttctctgtggcctgttctcgacgtggtagtgagagcaatctgatcacatcacctctctgcctaaaccctcaggtcactctaggttaaagcctcagtccttacagaagcccatgaggccgggtgtgaactggctccctgtcgacttctctgacctcatgtcactgttgcgctctctgccccagccatgaagacctctgaggtttcatgcgcatgctagggcggcgtccagcctcagggcctttgtaccacctcttgctggaacacttctctgatcaccacatggctcgctccctttcctcctacaggcctttggtcacatgtcgccttgtcggtgaggcctcgttatctaagattgcacaccccctcccctggcttggagcacattcacgcgctttgcctgcttaaccaccatctgccatgcactgtgtgttatctgttcactgccgtgtcctcagcacctgggccagcatctggtgcacagtagccgctgagtgagcaggaaccgagtgcaggcacaaatgcgtcgtatgctatagtggccgcaatagtgaggatcaaatgggcgccagctctgcgtcagaccctgctcagcaccttgggtggtcttgcgtctcttgctcacaaaagcctgatgaggtcctcacttcgcagatgaggaaactgaggcccagagataccttgacttgcccagagcccaaagagcctgggttttggagttttttttttgttttttttgttttttttttaattgatcattcttgggtgtttctcacagagggggatttggcagggtcataggacaatagtggagggaaggtcagcagataaacaagtgaacaaaggtctctggttttcctaggcagaggaccctgcggccttccgcagtgtttgtgtccctgggtacttgagattagggagtggtgatgactcttaaggagcatgctgccttcaagcatctgtttaacaaagcacatcttgcaccgcccttaatccattaaccctgagtggacacagcacatgtttcagagagcacagggttgggggtaaggtcacagatcaacaggatcccaaggccgaagaatttttcttagtacagaacaaaatgaaaagtttcccatgtctatttctttctacacagacacggcaaccatccgatttctcaatcttttccccacctttcccccctttctattccacaaaaccgccattgtcatcatggcccgttctcaatgagctgatgggtacacctcccagacggggtggcggccgggcagaggggctcctcacttcccagtaggggtggccgggcagaggcgcccctcacctcccggacagggcggctggccgggcagaggggctcctcacttcccagtaggggcggccgggcagaggcgcccctcacctcccggacggggtggctggccgggcggggggccaacccccccccacctccctcccggacggggcggatggccgggcagaggggctcctcacctcccagtaggggcggctgggcagaggcgcccctcacctcccggacggggcggctggccgggcggggggctgaccccccacctccctcccggacggggtggctgccgggcggagacgctcctcacttcccagacggggtggttgctgggcggagggtctcctcacttctcagacggggcagctgccgggcggaggggctcctcacttctcagatggggcggttgccaggcggagggtctcctcacttctcagacggggcggccgggcagagacgctcctcacctcccagacggggtcgcggccaggcagaggcgctcctcacatcccagacggggtggcggggcagaggcgctccccacatctcagacgatgggcggccgggcagagacgttcctcacttcctagatgggatggcggccgggaagaggcgctcctcacttcctagatgggatggcagccgggcagagacgctcctcactttccagactgggcagccaggcagaggggctcctcacgtcccagacgatgggcggccaggcagagacgctcctcacttcccagacggggtggcggccgggcagaggctgcactcttggcactttgggaggccaaggcaggcggctgggaggtggaggttgtagcaagccgagatcacgccactgcactccagcctgggcaccattgagcactgagtgaaccagactccgtctgcaatcccggcacctcgggaggctgaggctggcggatcactcgcggttaggagctggagaccagcccggccatcacagcgaaaccccgtctccaccaaaaaaatacgaaaaccagtcaggtgtggcggcgcgcgcctgcaatcgcaggcactccgcaggctgaggcaggagaatcaggcagggaggttgcagtgagccgagatggcagcagtacagtccagcttcggctcgggatcagagggagactgtggaaagagagggagagggagaccgtggggagagggagagggagagggagctgttttgttttttgagatggagtcttgctctgtcccccaggctggagtgcagcagagcgatctcggctcactgcaacctccacctcccgggttcaagcatttctcctgtctcagccccccaggtagctgggactacaggcgcccgccaccatgctcagctaatttttgcctttttaatagagatagggtttcgccatgttggccaggctagtctcgaactcctggcctcaagtgatccaccctccctggcctcccaaagtgctagaattacaggcctgagccactgtgcccggccaagcctgggttcttaaacactaggctactccgcctcccctaatcttgacagcagctcgcgtttcttgagcagggaccatgccaggcaccatgccaggtgacatgttttacccacatcctcactgtgccactctgtcccacacccacccccgtgcctactgttggcggagtccttttggagcatatttccacagccatacccccacccccacccccagtctcagtgccccagagcctgctggggaaccagtgggccagggaatggtgacataagccatctcccgtggaggggcaggcccgttttgaatgacttgtgacagtgagtctctctctttgtgaagcacccacagggtacagattccacactctccccggcaggctgactcaactgccccagacatcctgaactaacggtatcccatcactggttaattgaatgagtgttgttatgcgcctggccttggcctggccagtgctgggacatagtgatgaccataacagacccaggcctactttcatggtgctcctctctgggacagatattaaacacgcaattcggccaagcgcggtggctcacgcctgtaatcccagcactttggaaggccgaggcgggtggatcaccaggtcaagagatcgagaccatcctggccaacatggtgaaaccccatctctactaaacatacgaaaaaattagccgggcgtggtggcgggctcctgtagtcccagctactcaggaggctgaggcagaagaatggcgtgaacccgggaggcggaggttgcagtgagccgagattgcaccactgcactccagcactccagcctggtgacagagtgaggctccatctcaaaaacaaaaacaaaaacaaaacaaaacaaaaaaaaacaccacgcaattgaagtgccaagagcttaaaaggggggtgtggaggatgccaggagaacctatcagatggtgctaaatcagacaaggagaaggtctcaaatccacaggttggatacagtcccagatgtatttagttagttaccacagtttaacatttagagcaagcttgtccaacctgcagcccaagagggctttgaatggcacccaacacagattcataaagtttcttaaaacattatgacattgtgagtttttttgtgatttttttaagcttatcagctatcattaatgttagtgtatttcatgtgaggcccaagacaattctttttttttttctttaagacagtctctctctgttgcctaggctggagtgccatggtgcaatctcagctcactgcaacctccgcctccccggttcaagcgattctcctgcctcagcctcccaagtagctgggattacagatgtgcaccaccatgcccagctaattttgtatttttagtagagacggggtttcaccatgttgcccaggccggtcttgaactcctgacctgaggtgatctgcccacctcagcctcccaaagtgctggaattgcaggcatgagccactgtgcccggcccaattttactttttaattatagaaaattgcaagcatacactaaagcaaagggaatcatataagaaccccagtcttggccggctgcagtggctcacacctgtaatcccagcactttgggaggccaaggcagttggatcaccagaggtcaggatttcgacaccagcctgaccgacatggagaaaccccgtctctactaaaaatacaaaattagctgggtgtggtggcgcatgcctgtgatcccagctacttgggaggctgaggcaggagaattgcttgaatccaggaagcggaggttgcgatgagccaagattgtgccattgcactccagcctgggcaacaagagcgaaactccgtctcaaaaaaaagagaaccccagtcttcattaccatctacaatagttactgacccatggctgatcttgttctttcttccttccctctctttcccaattattttgaagaaatcctagacatcttatcatttcatctgtaaatttttcaatatttatttctaaaagatacaactcttaaaacataacatagccatcatacataaaataaaaaattaacgataattccttattgtcaaataaacacattgtcacccatgagtgggctataaaatcaatcacagagatgtaattttttttatttttaattttaactttaatttttaaagacaaggtcttggtgtcaccccggctggagtgcagtggcacagtcatcgctcactgcagtgtcactctcctgggctcaagcctgcctcccacctcagcctcccaagtagctgggactgcaagcgtatgccaccatgctcagctaattttttttttattttatttttagtagagatgaagtcttgctatattgcccaggctcatcttgaactcctgggctcaagcagtcctcctgccttggcctcctaaaagtgttgagattacagagattacaggtgtgaggcactgcactcagcccgagttgcaacagtgttaaaggttagatatcttagtccacttagcctgaatataacaacatagcttaggtggggtagcttataagcaaaagcaatttatttcttcgcatttctggaggccaggaagtccaagataaaggtacccgcaggttctgtatctggtgagggcccctttcaacttcacggatggcaccttcttgctgtcatggtggaagaggtgaacaagttccttgggcctcttttttttttttttttttttttttttttgagacagtctcgctctgtcgcccaggctggagtgcagtagcgtgatctcggctcactgcaacctctgcctcctgtgttcaagcgattctcctgtgtcagccccctgagtagctgggattacaggcgtataccaccacgtcaggcctcttttatatgggcactgatccccttcatgagggttctgccgtagtaataggatgggaaagaataaaaagtgtcacagtgtgcctcagtgagtaaagataagactattttatgaagcattgttttggtcacacgtttcccccactttccaaattctcgccgtccaaatcaggaaccaaacagattcagtgacattttcaggtaagtactttaccatccaaatgcttacttcttgctatccacactcaagaatgtgacggatttgaattgcaaggaatatttgtgtctgtgggcatgtgtgtaaaacacgaatgtgtagagtagtttgtgacgtaaaattatttctaaaacacgaatttgtagagtagtttgtgacataaaattatttctttccttggccgggcgcagtggctcacgcctgtaatcccagcactttgggaggccgagacaggtgaatcacttgaggtcaggagttcgagaccagcctggccaacatggtaaaaccccatctctactaaaagtaccaaaattagctgggtgtggtggcagatgcctgtaatcccacctactcgggaggctgagacaggagaattgcttgaaccagggaggcggaggtggcagtgagctgagatcgggccactgcactccagcctgggcgacagcgagactccgtcttaaaaaaaaaaaaatttattcctttcttcaagtggtggtgagaaaagtatgaaagcgggcatcctgataggtatgttacatagcatcatttctagccaggggatgacttctcacaggaaatgtaagccattccgttatctttccataacgcagttttaggaaagggcaggcattcttgacaacttgcttaatagccatggctggttacattcatcttgtttttatcccaagaagaggggatcgcttaacagcatgctggggggagggggcagggctctattcagcaggtcctcagatcttatggtaacacattatccaggggaatatctcacccagtgaagcagggagtcctggaggccaggccctgcgtggtccgatcagctccatgttgggggaaggtctgaggaggagatggggaaagggtttcttcctccaagaatggtgtcacgaggccgggcatggtggctcacgcctgtaatcccagcactttgggaggccgaggcgggcagatcatgaggtcaggagttcgagaccagcctgaccaatatggtgaaaccccgtctctactaaaaatacaaaaaactagccgggcatggtggcgcgtgcctgtaatccctgctactggggaggctgaggcaggatacttgcttgaacccgggaggcggaggttgcagtgagccgagatcacgccactgcactccagcctgggcgacagagcgagactctgtctcaaaaaaaaaaaaaaagaatggtgtcacgaagtaaaagaatataatgtgagttcccaacctagaaaaggtcccagtacttctggtctcatgcttccttgtgtattttagttagagtcattgtgtcagtcaggatacagtattagtggcttaaagcaggtttggctgggtgtggtggctctcacctgtaatcctagcactttgggaggctgaggcaggtggatcatctgaggtcaggagttcaagactagcctggccaatatggcaaaaccctgtctctactaaaaatacaaaaattagccaggcgtggtagcagacgcttgtaatcccagctactcaggaggctgaggcaggagaatcgcttgaacccaggaagcagacgttgcagtgagctgagatcatgccgctgcacttcagcctgggcgacagagcaagtctccgtctcaaaaataaataaataataaaatgatgaaataaataccacagcccagaggacatggcagtgccactcgcaactctttggccaaaacaagtcccagggccccacccaaccacaagggagccaagaagtgcaatcccactgaccccaggaaggagggagttcggggcctttggagccacagctcatgactgccatggtctctgcaaggttagaagccacggggtcgcatatccacatttcccctccagaaatcaggaagccaggctgggaccgggtgcgtgttccccctgcgggtcccctgccatcacccgggaaggtattaatagatgggagttggcaggtttttggcttcaaagcggggaacgtgaccaggggtcttccagaggagctgacccaagcagcttctgaggctcgatcctgcctgtggcctgcaggtgatgaccagtggctgggagacggtggacatgacgcttcggcggaacgggctcgggcagctgggcttccacgtgaagtacgacggcacggtggccgaggttgaggactatgggttcgcctggcaggccggcctccggcagggcagccgactagtggagatctgcaaggtggccgtggtcacactgacccacgaccagatgatcgacctgctgcgcacctctgtcactgtgaaggtggtcatcatcccgccttttgaggacggcactccccggaggtaagggcctccacctttcagccaggtggtgggtggcagctcccagatcgctggcatgaggcctccctggcactgtcacttgaggtcccaatagaggggggataggcaggcccttctaggcaggaatagtggcaacagtgacaggacggggagggcacatctacagagcgcttactgtatgccagttattggtttagcccttcatacgtgcatgatcgcatttaatctccacagttgccctgtgaggggagagcctcattcttcccatttcctacatgaagcacaggatgttaatagttgcttgcctgtgggccccccacacttcattcatttgttcaaaatgtgtttattgagcccctactgtgtgcaagctctgttcaaagtgaccacaacaaagtgcctgctcccttgcggtttgtgttctacagggaaagacaggccgtgaagaaataggtgtgtcataccggatcaggtagtactaagtctcagaaggaaattaaagcagggtaatgaaggggctgcagcacgatgggagagctgcttacaaggcgggcagagaaggctccacgaggctccacagggaggcagccatgtggttttctggccagcgggctccagacaggagctggccagggcacagcctccccagtgtacatgggtgatgtgttcctggagtacggggaggcccatgtggctggagcagagcgagcaggagtgagagctgagagcaaaggacagagaggtgaccaggcaggcggtgtgggcttcatgggttttattccatgcttgggttttattccatgctcagtgggaagctggtaggtgacttatttattttgttttgttttttcttttgttgtttttgttttttgtttttttagatggagtctcgctctgtcgcccaggctgaagtgcagtggcgtgatctcaactcactgcaacctccacctcccgggttcaagcgattctcctgcctcagcctcccgagtagctgggactacaggcacgtgccaccacgcccagctaatttttgtatttttagtagacacggggtttcaccatgttgtccaggatggtctcaatctcttgtcctcgtgatccacgtgcctcggcctcccaaagtgctggagttaacaggcgtgagccactgcgtccagccaacagcaatttcgtagtgtcaactatctagactgggttcacacctgtaatcgtaacactctgggaggctgaggtgggaagatcacttgaggccaggagttcaagaccagcctggccaacacagtgagaccccgtctctgcatctctgcatctctgcctaaaggagaaaaaaaaaacagtgcagttgtagccccagctattttcaggctgaggtgggaaaatcacttgagcctaggaagttgaggctgcagggagccatgattgtgccactgcactccagcctgggcaacagagggagacctcatctctttgttttttaaacagttgttcatcagaattctcctattggccgggtgtggtggctcacacctgtaacctcagcacttcgggaggccgaggcgggcggatcaccaggcgggagttcaagaccagcctgaaccaggctggagtccaagaccagcctgaccaatgtggagaaacactgtctctactaaaaatacaaaattagctgggcgtggtggcgcatgcctgtaatcccagctactcgggaggctgaggcaggagaattgcttgaacccgggaggcagaggttgcggtgagctgagatcgtgccattgcactccagcctgggcaacaagaatgaagctacgtctcaaaaaaaaaaaaaaagaaaaaaagaattctcctattgcatttgattcatgtatctcttgaggctctttttttttttgctttgagacagagtcttgctctgtcacccaggctggagtgcagtggcgcaatcttggctcactgcaacctccgcctcctgggttccagcgattctcctgtgtcagcctcctgagtagctgggattacaggcatgtagcaccacacctggctaaatttcatatttttagtagagctggggtttcaccatgttggccaggctggtcttgaactcctgacttcaggtgttccacccacctcagccacccaaagtgctgggattacagatgtgagccaccgcgcctggccttttccttgcagtttattttggaaagaaaccaggtcacctgtccttagagcttcccccttcctggctttagctggcggcctccccatggtgtcctttagcctattgctccaccactggtattttctgtaaactagagtcaaagatggaagcttgcttaggccccaatgggatgtctttcggccgcagcactcctaggtatgcatctgtgagaaggcactgcgtgcctggtctccccctgcaagtgacactaggggcaagcagaggcttcagacagcggcacctggccatcaccacatgtcccctccagtcctgtttcacagcccagcagccactgctaggccctgcctagatccatcatttcatgacggtttgcagacgagtgccatcttcattctgtcattccttcttcatatattggctggaatgcttctaaaaagagctttctttcagtaaccgtttagttaccctgaggtataatttgtacagagaagacaagataaatacagttttcagaataatgagttggtccctagcaacctccagaagtgaccaatgagagagacgcaccatgttctcagctctggaaacagtgcacagaggacagccaaggccttggcctcatggagtgaggccccaatgggtcaggggagacaaacagtaaacaagtaaatgaatgagatgattttatatcacagagtggggaggcaggagagcatagcaggagaggcaggctgtctaggtttgaatcccagctcttccccttgttacctttgaccctagggaagtggccttaccaccctgtgcccggtttcctcatttgtaaaacaaggacaataacgtcctttccacaagagcgtttgtgaagttgaaggagatccaacttgtaaagcacgtaggacaggccagacccagtgaatttgtgactgtggagtgctggtggctctcagcacttttggaggccgaggccagaagatcacttgagcccagcagttcgagaccagcctaggcaacatagcaagacctcgccactacaacaaattttttttttttttgagactgagtttcactcttgttgcccagactgcagtgcagtggcatgatcttagctcactgcaagctccgcctcctgtgttcaagcgattcttctgcctcatcctcccgagtagctgggactacaggcatgcaccaccacacccagctaatttttgtatttttagcagagacggggtttcaccttattggccaggctggtctcaaactcctgacctcatgtgatctgcccgcctcgacctcccagagtgctaggattacaggcatgagccactgcacccagcccaaatttttaaaaatcagctaggtgtgatggcacatgcatgtagtctcagctactcagggtgagataggaggttgagactgcagtgagctgtgatcacaccactgcactcaagctttctcaaaaaaaaaaaaaaaaaaaaaaaagccaggcttggtggctcatgcctgtaatcccagcactttcggaggccaaggcgggtggatcatgaggtcaggagtttgagaccagcctggccaatatggtgaaaccccgtctctactaaaaatacaaaaattagccgggcatggtagcgtgcgcctgtagttccagctattcaggaggctgaggcagaagaatcacttgaacccaggaggcagagtttgcagtgagccgattgcaccactgcactccagcctggatgacagagcgagactctgtttcaggaaaaaaaaaaaaaaaaaaaaaaaaaggcacgtgggacagtacttggcctataggaggcgctcgagagacactggcaccaagatactggatgtgaggactgtaaagggcacataacccacattggatagggtggtccgggaaggcccgaaggtgagggcaaaggcccttagcttggagacagaccagaaagaggacctgcatggctgcagcagattcagccaagaggagggcacaagatggggtgacgatgagtgccatattcacatatgaccttgctgggctcacaccagggctggtgtgatctctgctttgtagacgagaaaaccgaggcccagagtgaacaagtcactttgcagagttgtacagctagtaagcagcaaagcaaaattcaaatccaggtcggcctgtctccattatactctgcagcctctgaaagccatcacgagctattaatacacgggcatgcgagtgatgtccccaccctcaccttcctgagtcgtgcttgctctctctccacttggtgggggacagttctgggcaggcctaaaccctgaacctgagggtgtggccacccctacccacatcccagatggctcaacctcaggactccagtcatgccccgggtgtctccggttcccagcccttttctcctgccaccttcctaccctgcccggagccacagcccagccacacctgcttagatctctgcaggggcaagtcaaggccagataaccccacaggcaagtgccctggtggctacgctcctcgaggaaggacatgcacccctctccacacactcccacgggtgcacacgataagccagcttgcgcatcgcatgactctcaccccaaacatgcaggtagggacaaactgaaaggcaaagaaaagtctgcagttctccagctttggggagacagggccagggagagtgcaaccagacagaggagttcttctccctgcccttttcaggaggaagacattccctcctgttccctttataaggcagctgctgaaacaggatctcccgtttgcaggggtgggcgtgggtcaggacttgggtggtttttgttgttcttcaaatgcagaggtgtgtagctgacctcatttgcagagctgatgacccaggctctgggctttctccagcctgttgatgcaaccctggctcaaatgtctgttgtagtgagctctgaggcgagcagtgaggacgggatagaagtgccctcgctgccaccagccaggccgcatggcttgcacgctgaccccatgctctcagacaccgaggagaatgcatggggtcttcctcctacccccaggccacaaggctggagttttgtttgggtttttttgtttgtttgttttagttttgtttttcttcttttttcagacgaagtttcactctctgtgcctaggctggagtgcagtggtgtgagatcacgccactgcattccagcctgggcaagagagtgagactgtctcaaaaaaaaaaaaaaaaaaaaaaagaagaatgcgtaagaaagtgggagcagtggttgcttctggtagttgaaactggaggatgggattgggagacagggatgcgtgttatatcattttaatccttaaaaaaaattcaagggccagacgcagtggctcacacctataatcccagcactttgggaggccgagggaggcggatcacctgagatcaggagttcaagaccagcctagacaacatggtgaaacccggtgtctactaaaaatacaaaatgtagccgggcatggtggcaggcgcctgtaatcccagctactcaagaggctgaggcaggagaatcacttgaacccgggaggtggagattgcagtgagccaagactgcgtcactacacaccaacaagggtgacacagcaagactccgtctcaaaaaaaaatttttttaatcaataaatgaagcaggccttctcaaatgttattgtgtatcagcatcatcacaggcagctcagtcaaatgcagatccttgggccctgcctcaggggattctgatgcgtgtaatctgggatggggcccaggaatcttcattatttgctgagctcctgataatttcgatgatgatcattttcagatcactggggaaggcgagagccgggaggagctggggcagaatcttttccagagccccaaggtggtttggttggatttcagaaagtggaagtgaggcttttgcttctgtttgtgggaaaagcaggtaaactgtccttagaatcagctggaggaggcaactgcatcagctctgatttgttaagcagttgtcatgtgcagactctgctaacgctcagagaatgctcacagccagccccatattacagattaggaaactgaggctctgagaagagaattcctcacccacacccatgtaggtgataacggggctagaatctggatcagccatctggccccgcagccctggtctgtacctctccatgctgcatgctgccttcatttttgttgttgttgttgttgtttttgagatggagtctcactctgttgcccaggctggagtgcagtggcatgatctcagctcactgcaacctccgcttcccaggttcaagcgatcctcctgcctcaacccccctagtagctgagattataggcacgtgccaccatgcctggctaatttttgtatttttagtagagatggggtttcaccatgttggccaagctggtctttaactcctgacctcaggtgatccacccgcctcggcctcccaaagtgctgggattacagatgtgagccactgcacctggcccatatttttttttttttaggagatggggtctagaactcctgggttcaagtgatcctctcgtctgttcctcccaaatgctgggattataggtgtgagccactgcacccagcccatgctgccttcaaagtgattgattaatattttcctctttatattttaattattatttagttattatttttttggacacaggatcttgctgtgttgcccaggctggccttgaactcctgggatcaagtgatcctcccaactcagactgagttgtgtgagtagctgggactgcccagctatgtttttctctttgaggtcgtacccagggactcttagcccaagatgaagccatcagtacctaagggaaaaggccaggcatggtggctcatgtctgtaatcccaacactttgggaggccgaggtggatgcatcacttgaggtcaggagtttgagaccagcctggccaacatggtgaaaccccatctctactaaaaacacaaaaattagccaggcatggtggcaggcacctgtagtcccagctactcaggaggctgaggcatgagaattgcttgaacccaataggcgaaggttgcagtgagccaggatcacgccactgcactctagcctgggcaacagagccagactctgtctcaaataaaaaaaaaaaataataaagtaactaaaggaaaagtcaaggacataagaaatctacccactggctcccaaaccactctacggtggggccattgtccatggtggttaaagttgtgggctttggagtcaacgtgctaaatatttaaatccaacttctacttcttactggctgtttcaccttggatgggttatttaacttctctgtgcctcggtttacttgtctttaaaaggtgatgtactgatcaggactctgcgtaccagcaacagaacagactgaaacatggcgccgcaaaagagagtcttcactggctcacgtagccgacaagactaggagatgggacagcatttaggcatagccatatccagggactcagacaccctcaccaggagtctctgtcccttgtttacctttccatgtttgctgtcattctcagtcagtctcttgcctccccctcccacagggggttttcgaaacagttccagaataggacgtggtgcctcatgcctgtaatcctagcactttgggaggccaaggtgggcggatcacctgaggtcaggagttcgagaccagcctggccaacatgatgaaaccccatctctactaaaaatacaaaagttagccaggcatggtggcacatgcctgtaatcccagctactcgggaggctgaggcaggagaatcgcttgaacctgggaggcagaggttgcagtgagccgagatcgcaccactgcactccagcctgggtgacagaacgagactctatctcaaaaaaaaaaaaaaaaaactgagtgtggtggctcacgcctgtaatcccaacactttgggaggccgaggaggacagattacttgaggtcaggcattcaagaccagcctgggcaacatggtgaaatgccatctctactaaaaatacaaaaattagctaggtgtggtggcacacacctgtagtcctagctactcaggaggctaaggcgcgagaatcgctgaaacctgggaggtggaggttgcagtgagccgagatctcaccattgcactccagcctgggtgacagagcaagactccatctcaaaaaaaacaaacaactgatgctcgttatctctcgttggccctgcttagagcacatgacaattctgtgctagtcatcgtgtcagggtgggtgcttggagaaagcttctaattggtcaggcctgggtcacatgctaatacctggagccaggaagtggggtcagccccacccagagcccatattaacaaagacctgttatcaggagagggggtgtggggagagacaccaggcaggcaggaatggcaggtgtgcactgcctggagacagtgatagtacctttccccacctctgcccgggcctggcatgtctacaggctctgatagacgttcatattgttattgttcctcacctggtgcctggtgagacattggcagctgccagtccaaagggacagccagaagacactgccaagtgtcagttccagccatggcgctaccgaggggtgcggtgtgtcgggccctgggtgccagagcgcatccacctctgtcttagtctgttttgtgctgctatgacagaatatatgagatcggataatggataaagaacagacatacatttctcacagttgtgggggctgcaggttcaagatccaggcactggcaggatagggcctggtctttctacttccatgatggggccttgaatgctgtgacctctggaggacaggaacgccacgtccaaatacagcagaagagaagaagagagagagtccactcccgcaagccctttctatagtggcattcatccattcatgagggctctgccctaagctcctcccactagtccccacctcccaacagtggcattgggggttaagtttccaacacgtgacttttgggggaacacacatccagaccatagcagcctctgaaccaccatatccaccagatcttttgctgggtggccatgaacggggtggctccagggaattcaggagacactcagaggatcagctcgatgggggtatgggcacttccaggctgaaggctcctctgagctcagctctcagctgccaggaggtggatttcatgagcatggctcggggacccctcccatgcagggctgcagtggcagtggagaatgccagcccagccggcggatctccccgcctcaagccaggagcaccatggtgcatgtgccagcctggtctagggggagtcacaggtctctctgcatctatttcaaggttgtagatttcatggcttttttttttttttttaaccaccccacaaagtaggtcacctgctcctcttccagctgcctttaagattctttggaacaaggcagttactgtcctttgattctgaggacatccgcctttctggccctgagtaccgctaaggggggccaggcaggtctgtcgaggacactggcggcctggcagccgtgtggcctgggtcaggtagaagcgaggggcgggaacagagaattcgagtgggaggagggaagaggagatgaggtggaaagggccaggcagtcggagtccctgtgttgggtcccgtcctggttgaagactctgagctggtaagtttcagaccattttaaggagtattcactcgacttttaaaataggccatccccagccgggcgcggtggctcactcctataatcccagcattttgggaggctgaggcgggtggataacctgaggtcaggagttcgagaccagcctggccaacatggtgaaactctttctctactaaaaatacaaaacttagccgggcgtagtggcgcttgcctgtagtcccagctactcaggaggctgaggcacgagaatcgcttgaacccaggaggcagaggttgcagtgagccaacatcatgccgctgtactccagcctgggcgacaaagcaagactctgtctcaaaaaaaaaaaaaaaaaaaaaaaaagccatcccggtttatattgggccaggaaaacccagcctagacagcaggcccacgtgttggtgggctggggcctttctgagtaatgcagtttttctccccaggggttggccggagacctacgacatgaatacctcggagcccaagacggagcaggaaagcatcactcctgggggccggcccccctaccgcagcaatgctccctggcagtggagcgggcccgcatcccataactctctaccagcctccaagtgggccactccaaccactcccggccatgcccagtccctgagccggcccctgaagcagacccccatagtccccttccgggagtcccagccactgcacagcaagaggtaagcacctgctggggggaccaatacttcccaacccccaccagcccacacccatcctccgcccctccctctcctcactatttcctccatcctcttcctcgcctcaagctttcgaccttccttcttatccttatgtctcccttgttcctccctccctccttcgtttcagctttcaccgttggcctcttgtctggggacccagtgctggggagctctgggttagaaatccattatactaagtagacgactgaagctctgctttttaggctgggcacggtggctcacgcctgtaatcccaacattttgggaggtcaaggcaggagcattgcttgaggccaggagttagagagcttgggcaacatagcagaaccctggctctataaaaaacatttattaaaaattagccaggtgtgatgcacacctgtggtcccagctgcccaagaggctgaggtgggaggatggcttgagcccagaagttggaggctgcagtgagctgtgattgcaccactgcactccagactgagcaataccttatctctgaaaaataaaataaaataaaactgttatttttaaggtgaagggactgataagcacaaaatttaggacagtgacttcttcctggaggaggcagggaaatgggaagtggggaagcccacaggtagatgttagcaccaccgttctagtcctggggttggctggtagcttcagggagtttgttttatgatgatgacaaatataacttaacagatactcttttgaagatattatatattaaaagataaaaagaaaattttccaaaaaatgaaggaatccaacttgcagagggacatcttgtccccagggggcagaggcgagaatggtcttgagcagcctgcagaagctgtgagttgcgggcagccgcagtggatccgggaagagggggcccaggagcatcccagcttctctcgccctgtgctcagcatcctccccttcatcctgagcagtgaatagcagaagggatgtggctgggcgggggaaagttcggttggtctgtctgtctgtccgtctgtccatccatctgtctgtccgtccatcctcccagggcaggggtaccctcctactcaccctctgcctccttcctcccctgtctccttctaggcctgtcagcttcccagaaaccccttacacagtatcaccagcaggggccgacagagtccctccctaccgacagccttctgggagcttctccacccccggttcggccacctacgtgagatacaagccatccccagaaaggtcagcctccctcaattcttttcatgttaagggatctgatgaaagctgtgcctccttcttccccagcaaatgcacacccccacaattctagttgccattttatggtgtttctggacccctgaaggtcctcagaggagccccatggggtggttatgtctcaagttttggagcaaaactgggccgggctgggcaggacccatcgttggctttccttgcagcagaattttgattgctgttctcttgacacctgtcaagcaagagcatccactatccagcacggccatgcatctaactctctccagccctaagcccctaggaccaggctgccagcattacccagttttcgagatctttcaggattcagttctgcccacttgcgtccatctgcaacctggcagcctgagagatctccccaaaccctccatggctccccaccagcctgagagatctccccaaaccctccatggctccccagtgccctcaggataaacttggcattcaaggcccttcaggctctggctccggctgagcttattccccagctgccttcagccctcgtgccctctgttcttcctctgcccccaggtccctgtctcaggggcagccacatcaatcctagtccttgggcctgagctgtggccctcatcctgtgaatgtccccttcctcctcctccttgcagtggtcctcctcctgagcatctctgtcacccaccctctcctcctttccctgttctcttgcccaggccaccacagtgggcttccagccttcatctcacctcccctggtctaccctccactcaacactcaacagccagagggatctttctgtgtcttttttttttttttttttttttgagaccactctgtcgccagactggagtgcagtggcgcaatctcagctcactgcaacctccacctcccgggttcaagtgattctcctgcctcagcctcccaagtagctgggactacaggctctcgccaccacgcccagctaatttttgtatttttagtagagacggattttcaccatgctggccagactggtctcaaactcctggcctcaagcgatccgcctgcctcagcttcccaaagtgctgggattacaagtgtgagcccgtgcacctggccagatctttctatacctgaacatgcctgtcccctgctccaaaccctcccaccactcccagagccctcaggacacagctttggcccctccctgtggccaccagggcccctgcgagtctcgtgcagtgccacactttagccacactggccactcccagcttcctagggggactgtctgtatttcagagccttgatggtgttccttccttggcctgaatatgcttcacactcctcgcccacactccccccatcctaccaactcaagcttctgtgcccctctccagaacccttctctggagctccctcttgaggcaaggcactgccccccaattcctgtgtatttcctgactgtggccttgagcactcttcatccttattagccagctaagagtgtgtgtgcttgcgcacgtgcatgtatgtgcacctgtaagagagcgagagagagacagagagggtaagcgtgctcttcaagacctcccatcacatagtacacagtccgacacatggctgatctttggtatatattggatgaaaggatggagtgagtgggtttgttaaaatgaaaccacctgccttaagaccagggatcaggccaccaaaccagtggttctcaatctttagcaggcattggaatcacccagaggaggacttgttaaaatacagattattgggcctgagccccaaatttctgacctggtaggttcggggtgctgcaccagggaccattctctgagagtcaccacagtcatccattgttagattctaagcctcttgttcaattggagaaacacgcccactgtttcttcttctagtagccaccattcagctttcattcagcaaagggtctcaagagctttctggcgtgccaggaggagtatttgagatactcaattacgagggggttctgtagtcagcccttgctgactgtgatggagaggatcgtaaaaaccatgtgcactctgatgagcactctaatagaggaagagggaacacagcccagcactggaggtctagactggctgcctggaggaggtgacatctgaacagaagtttgagggactaataggagtctgcgacagagaggagagaaaaagtcattccaaacagagtaaaggccacagatatgaacaagcaggatgctgtgaaacacaggagaatcagagaggaatcgggtgtgtgcgggacatggggtgtgggggcacccaggtgacagcaggggctgaggttggaaatggcagtcagagtgactcaccagtaacaaaggtggtggcagtggtgttaccgaaagctcttgggaactgttgttgttgttgttgttttctcctaaagtcttggtatctgcctttattattttaactttttattttgtaataattactgagtcacaggaagttgccaaaaaaaacatacaggtggccgggcacagtggttcacgcctgtaatccctgcactttgggaggccgagatcggtggatcatctgaggtcaggagttcgagaccagcctggccaacatgatgaaaccccgtctctactgaaaatacaaaaaattagctgggtgtggtggcacgcgcctgtaatcccagctactcaggaggctgaagcgagagaatcgtttgaacctggtaggtgcaggttgcagtgagccaagactgtggcactgcactccagcctgggcaacaggagcaaaaactccgtctcaaaaaaaaaaaaaaaaaaaagaatacagggaggtcttgtgaacctgaacccttcacgcagcctcccctattgttaacatcttgtatggttataacgcaatatcaaagcaagaggttgacatgggtacaggcctacagcttattcaaaattcaccagttatacatgcactcatttgtgtgtgtgtgtctgtagctctgtgcaattttatcacatgtgaagtgttgtgtaaccatcacgaggtgcctcatgctacccttttatagccacacccatctcttccccctgtgcctaacccctggcaaccattcaccattcatctgttctgaggctcttttttttttttggagacaaagtctcactctgtcagccaggctggagtgcaatggcacgatcatatagctcactgaagcctcactcttctgggcccaagcagtcctcccatctcagctttgcaattagctaggactgcaggcatgcaccgccacacccagccaatttttcttttctttcatagagacaaggtctcgctgtgttgctgagactgatcttgaagcccttgcctcaagccatcctcccacctggacatcccaaagtgctaggattacaggcgtgagccaccacacccaacctgtcttttaattattgttatttcatgatgaatgttagataaaaagaatcagatgtacgtatgcttcagaggttgtctttttcactcagcagaatgtccttaaggttcatccacgttgtcgcgagtctctagttcactcattatgctgtttattccgtggtctagatataccacagtttaaccactcacccatcaaaagacatttgggggagtgcatattcagggcactttgaatctatgctgctgggttgaaataaagttttttaaaatattaaaaatatattttaaaaagatttaaaaagacatttgggtagtttccgagttttggctattataaatattcatgcggtgaacatgtacattcaggcatacaggtttctgcatgaaaataagttttcatttctctgggataaatgcccaggagtacaattgcttaccgtatggtaagtccatttttagtttgaaaaggaactgccaaactgttttccagagtgtctgtatcattttacattcccaccagcagagcgtgagtgatccgggtctccacatcctcaccatttggcgttgtcactgtttttcattttagctacttttgataggtgtgcagtgatatctcactgtgattttaatttgcatgttcctaatggctaaggatattgaacaccttttcatgtcttatttgccacccctgtatcctcttcagtgaagtgcctgtgcgtgtcttttgtgcgtcttctaattgggtgtgatggtgttctgtgtctaagagttctttggacattctaaatacaagtcctttgtcagatatgcgatttgcaaatatttcctcccagcctttagtttgtcttttttacagggtctttcacagaacaaaagttttttattttattttttatttttatttatttatttattttgagacggagtcttgctctgttgcccaagccggagtgcagtggtgtcatctcggctccctgcaacttctgcctcccaggttcaagcgattctcatgcctcaacctcccatgaagctgggattacaggtacgcacaaccctcccagctaatttttgtatttttagtagagacagggtttcaccatgttggccaggctggtttcaaactcctgggctaaatcaagtgactctcctgccttggcctcccaaagtgctgggattataggcatgagccaccacacccagcctaagttttttattctgataaagcccaaattatcttttttttattattattttatggatcaggtttttggtgttgtctaagaactctgcttagtgctgggtcctgaagattttctcgtttttttttctggaagttttactcttttacatttaagtccatgatccattttgagatttgtttgttttaatttttgtgtaaggtgagaggtttaggttgaggttcctttattgcctatggttgtctgatttactccagtgctatttattgaaaaggttacccccactccactgtactgcttttgttccttaaggcaaaaatgggggagtgcagaattaattggatatccttgtgtggatctgtttctgggttccattgatctatacgtatgatctcagtgagtcctcccagcaactccttgaggtgggtagtttaattgccctcattttacagagggaaactacagctcagtgaggtgaatttgcttggctgaggtcactctgccaggacgtaacagagccaagatgagaacccgggactatggttccagagggctgaccctgacgtagaactttgggaggctgaggtgggaggattgcttgggcccgggctgtcaaggcttcagtgagccaggtgtgtgacattgcactccagcctgggtgacagagtgagactctgtcccaaaataattaattaattaagagggaaggggccgggctcggtggctcaagcctgtaatcccagcactttgggaggctgaggcgggtggatcatgaggtcaggagttcgagaccagcctggccaagatggtgaaaccccttctctactaaaaatacaaaagttagctgggtacggtggcaggcgcctgtagtcccagctactcgggaggctgaggcaggagaatcacttgaacccgggaggcggaggttgcagtgagctgagatcgcgccactgcactctagcctgggtgacagaacaagactccatctcaaaaaaaaaaaaaaagttgggggaaggaactggatcacttgcccacccctcaacccctggcaaggtcacattgcacctctgtggctgtgttaactgtgaggatttactcaagtcacgagacagagggctggctgccagagtggaatctgggcaagcaggaacggaggtgatggctgctggggtggcagccaacaaggctacatcatctgaccgtcattttgcccaggcatcctgtcattcacctgtctattgtttcatcggttgatgtgggagattgacagagcgggctggagctctctgcccggcgaggctcctgcccacagtcctgtctgttttggtgctttcctctgtggccaagagggaagctcaagccagcgtcccgtagcccaaccctgctccccgtaaggttcctccccagagtcagtacctccagcttctgcctggagacatctgaaaccatagctagtcagctcatcccaaaacaccaaaccctttataaagtgagttatcttccaagaagagataattactttaaaattactcagatgaggttaaagacagcaatttgatcttctcttctgccggggatgtttccccagagctgtgtgtgatgagatgctggaatgtcccgatttctaatcagtttgaccaaaattggacagtgatagacatggtctcaaatgggatatattcagcatcccaatgaatggtcaacataggtcagtttgcattgggataataaaaagtcttgttagttgggtggggcacagtggctcacacctgtaatcccagcactttgggaggccgaggtgggcaggtgcaagcagatcacttgaggccaggagtttgagaccagcctggccaatatggtgaaacctcatctctaataaaaatacaaaaattagcttggcaccttggcgtgtgcctgtcttcccttgggaggctgaggaaagagaatatcgcttgaaccctggaagtggaagttcgcgtcactgctgcactccagcctaagcaatagggcaagactccgtctcaaaaaaacaaaaaaagtcttgttaacaagagaagtacatggttggataaagtacgggttgtctgattggggaaagtagctgagagatgaaacaaggtaaaatatgcccaactaaagaggagggtctatgtattacgattaggtttagctgcatagtatacaaaatagtggttctgacaagattgtttctttccccacattgacgggaaaccaggccccccctccttgatgtattgctgtccttggccttttgcctcctggttcaaagtggctgttcaagctgtagccttgaggaggtggtgaggcaaaggcatccacagcacactcatgaggaagcttcgaggctggaagttatgtgtggcacctccacttttatctcattggccagagctgcaagggatcctgggacatgtagtctggtgatccagtctcattgctgccccagatacagttgggattctgttaccaaggaggaaggagaggctagtcatggggagcagcctgcagcatccgccactcagactttccgccctccccgggctcatcctagccatttttcctgagtgctgaggatttcacagcgactttttgggaaaactgagtaagtgcatcaacactccgaactccagcaaggatggagccacattttaccaggcagctagccaggtgtgaagtcagctagtaagatgaagattgcttatagtcaaagttgcttttgtaaaatccctttgattgctggaaactgggccctcagacattgagaaaagtaagaattcacgtttcgtacttcctgtgtttgggccctgttttcctttcctggaggtgtcagtggtcaaggtctggttgagggcagggaggatggtgtgttttttcctggcaagtgagtggagttgagttttcagagagtgcagtgccccttgaaacacctctctactgtgctcagggcattgaagccaggggattagggcagggtccctgtagagacagtcctggctttgagctggcagggtgaccctggataagtcagttacttcctctttggcatcttgggggatcctagtttatcacctcacctccccctaccagatcctcccaagttgaaaatacagatgccaggagccaaccagggaattgcaatatcaacactttttttttttttttttttttgaaatggagtcttgttctgttgtccaggctggagcgcagtggcacagtcttggctcactgcaaccgcaatctccgcctcccaggttcaattgattctcctgcctcagcctcccaagtagctgggatgtcacaggcacacaccaccacacctggctaatttttatatttttagtagagatggggttttgccatgttggccaggctggtctcgaactcctgagctctagtgatctgcctgcctcggcctcccaaagtgctgggattacaggcgtgagccaccacacctggctaatatcaacattattaatggaggctcagtaactcccccagagcacagggcctgtgtcagtgaggtgcttctggctgaagtaaccaaaatttggctcaaacattgtaggaatttgttatctcacagaaaaggaagctcaggagcagggcaggttccagggagggtgaacccagcatcttgaccacattatcaagggccagattccttctgcctcctctcttccaccatcagagtgggtcttacctgcagcctggtagcaacagggcagcagcagcttatgatgttaaatctggacccagcagcatctggagggcaaagagaggccatcttttcttgtcatccctcttaggagcaaggagatttcccagaagcctctgggcagacttaccccatttcagtcagacggtgctgggtaacagacacctgaaagtctccgtggcttaaatcagcaacgtttatttctcagcccctccgcagttccactgctggttggcagggacctctcaggacccaggctacccaggcagccagcaactccaagtcacttccctgacagctcagctatgagcgctggtcacatgactccattcagccagtctcaagggacctggaagtgtgtcctgccacctgcttggaagtggagaactggaatgttttgtgggcgtcttaataactcacctcccttcgtgtctcatcagccaaaattttgtcacaggcctgtctctgaaccaacctcagacagggagaagaccttctaccacaaccggctgtgatccaaggaggactggacgttaggaagtgtctacaagattcaccccatggttgtagacagggccactggggccgggcatggtggctcacatctgtagtcccagcgctttgggaagctgaagtaggcaaatcgcttgggcccaggagttcaagaccagcctgggcaacatggtgaaacccatctctacaaaaaaatactaaaaattagccgggcgtgtaacatgcagctatagtaccagctactcaggaggctgaagtgggaggatcgcttgagccgggaggcggaggttgcagtgagctgagattgtgccactgcactccagcctggttgacagagcaagaccccatctcaaaaaaaaaaaaaaaaaaaaaatagagaatgccactgggacaggagggcacagtgagagccttctaccaccacctcccttaaatcctagccttgcatgtgggtgtgcgaagctggcctccaggaggacctctgtctaggggataactttattccatccactccccaactctatgaggtagaaaatgttacctcgtgagctgggcgtggtagaacacacagagttctagcccatcagccaggtgtcccaagtcaccatgtgtcaggaatcaaacccctgcctaaacactggacatgacggggcatccttcagtcctgagaagaaggacctactgttatcgcctcttgacagctaaggaaactgaggctgtgggctaggaagtggctgcatctgtctaggcaagaggccatggtgagctttgaagccccagttgcccaactcagggcctgctgcacccatgaatgcttcccaacctgctgtctccatcagagcaaggcagcccgagagaggcctggggcagtagctgctggggacattcaccccatgtcacagccagaaaacaggacccctgagaggagcccaggggtagggctgtcggcccaagcggcctctgccccctccttcccttaggaacccgccttgccccgccgccaccagctccctggcaggcttcccaggcgagactctcatcccggacccgcagctaatagcacgtttccaggcttactcatccagccttcctaaccgctttctctcatccacagcggagcctcccgtgtgtctaaaacccactggcgagcaaggctcaggctcaggctcaggtggttttcgacataggctgatctttaaccctgggcacgttcttctcatcccctgcaggtacacggctgccccacaccccctgctatctcttgatccccacttcagccacgatgggacgtccagcggcgactcctcttccggcggcctgaccagccaggagagcaccatggaacgccagaagccaggtagggcccccaccagctgctgcgcccacccgcctgcctcactccgcaggacctcttacttagagcttgacaggcaacactccccctcttgtgagtgacggataaaacacaaaagaaagctgtaagcgccacatgtaagactagagagggcacctaggagagcagcggaaccagcaagcgagatccttatccgtccagacagggcatcggcaggtggcgtctgctcccgctgataaggccagagccggcgtgcagctgtgtgacatggagctgggagccaccagggaaggtagctgaaaaagattaagcattgagctctcaggagcaggactggctgcgtcccgtggcttttcattacataaaccctcctgtgttgttttcaacttttatggacatacggcacatgttaagagcccacatggccaggcggggtggctcacgcctataatcccagcactttgagaggccgaggtgggaggattacctgaggtcaggagtttaagaccagcctggccaacatgtggaaaccccatctctactaaaaatacaaaaattagccgggcatggtggcatgtacctgtaatcccggctacttgggaggctgaggcaggagaatcacttgaacctgggaggcagaggttgcagtgagctgaaatcgtgccactgcactccagcctgggtgacagagcaagattctgtctcaaaaaaaaaaaaaaaagaggccaggccaaggcgggcggataataatttgaggtcaggaattcaagaccagcctggccaacatggggaaaccctgtctctactaaaaatacaaaaattagccaggcgtggtggtacatgcctgtaatctcagctactcaggaggctgaggcaggagaattgcttgaacctgggaggcagaggttgcagtgagccgagatcgagtcactgcactccagcctgagcgacagagcaagactctgtctcagaaaaaaaaagaaaagagcctacatgatgaagacacagcctgataacctatcgcagagtggacacacccaggcaggaaatataacatggctagcctctccaaacccccattcccctcccagttagtacccccaaaggaaccctgtcctacttctcagcctgagctttgcctggttttgaatttcatagaatacagaatcacactgtgtctattttgtgtatgtgtgtctggtttctgtcactcagtgttacatttgtgacagccagccagtgaatgtacatggtatcgcagtatctgagtggtatcccccgttgtatgaataagccacaacttattgccacatcttggtgttgatagacatttgggttgtttgcagttgggctgcctagagcagtgttgctaggaacattcttgtgcctgtcttttgatgaacataggttcacatttctgtagggtatacacctaggagtgaaatttctaggtcatatttttaagttgattttattttatttatttatttatttattttttaaacggagtttcgctcttgtcacccaggctggagtgcaatggcacaatctcggctcaccgcaacctccaactcctgggttcaaacaattctcctgcttcagcctctcaagtagctgagactacagacatgcgccaccacacctggctaatttttgtatttttagtagagacggggtttcaccatcttggccaggctcgtctcgaactcctgaccttgtgatccacccgcctcagcctcccaaagtgatgggattacaggcgtgagccaccgcacccagctattttattttattattcattttttttttttttttgagacagagtcttactctgttgcccaagctggagtgcagtggcgtaatctcagctcgctgcaacctccgcctcccaggctcaagcgattctcctgcctcagcctcccaagtacctgggaccataggcatgagccaccactcctggctaattttgtatttttaatagagacagggtttcaacatgttgccaaggctggtcttgaactcctgacctcaagtgatccacccgcttcggcttcccaaagtgctgagattacaggtgtgagccaccacacagggctagtatgtttaactttataagaaggtgccaaactgtttcccaaaatgacaaagcatcttatactctgtctatcaacatgtgagagttctagttgctgcatgccctcaccagcctctgtgtttcattcattccggtgggcaggtggtgctaccacattatggttttattttatttattattttttaaaaacattttttacagagacaacgtcttgccatgttgcccaggctggtctcaaactcctgggctcaggtgatcctcctacctcagcctcccaaagtgctgggattacaggcgcgagccaccgcacccggctggctttgtaatttgaattctttatgtctgtaatttgcatttttctgaagactgctaagatttgagcatcttctcaatgtgtcttccccattattaatcatgttgtgaactactcagatgaatattttaaacataattccatagaacaaacttgtagcccctttgaagtctgagaaccagcagatgaatgggcgagatggattcagaaggaagcaaacaaatgagcaatgttagaaagcagtgacgtcagagtgggaggggtggagatgtcctcttagggagtgtctgagaatttccaggcagctgggagagctgaccccatcagcacaccagctcccccagatgctgtggggtacggaagaggctgcatgccccaagattcgtggcctggagaattcctcaatatctcagcccatggttctcttaaaccagagacagtgtcacgcctataatcccagcattttgggaggccgaggcaggccgatctcctgagatcaggagttcgagaccagcctggccaacttggcgaaaccccttctctactaaaaatacaaaaattaaccaggcgtgatggtgcatgcctataatcccagctactcaggaggctgaggcaggagaatcgcttgaacacgggaggcagaagttgcagtaagctgagatcgcgccgttccactccagcctgggtaacgagagagaaactctgtctcaaaaaaaacaaaaaccagagacagtggttgggcttcagggaagcaggtcgaactgctggggcctcagcctctttgctgtctccagggtgtgcgtggtttgctcctgtcctcagcacatttgatcatgtcactgcctgcaattctgtcatctttgctccaagacagatagatttggatcccttttttcctttttcctcagcaagttcagaaaaagagaaaagtgttgcttggctatttcattacacaccaaagtacaaaatggggaggaagtgtttcctgcatacaccatgggccccaaaaaagaaactcaccattgcccttcccttccctcttctgtcccctggagcttggctcccctctcacttccttgggaccttgttatagttgactcctaaaattgccgccgccatacacacacgcccacatggatcaggggaatctgtgtttagaaatcatcatgaggctgggcgcagtggctcacgcctgtaatcccagcactttgggaggccgaggcgggtggatcacttgaggtcaggagctcaagaccagcctgaccaacatgatgaaaccctatctgtaccaaaaatataaaaattagctgggtgtggtggcatgcacctgtaatcccagctactcaggaggctgaggcaggagaatcgcttgaacccgggagacagaggttgcagtgagctgagatcacgcattgcactcctgcctcggagacagagtgagactccatctaaaaaataaaaaaagaaatcattgtgaggtctacaatgtattcaagactcagaaaaaaggccagggacagtggctcacacctataattctagcactgtgggaggctgaggtgggaggattgcttgaggctaggagttcgaaaccagcgtgggcaacctagtgggactctgcctctacaaaaaataaaaaaatatagctaggtgtggcagtgcgcacctatggtcccagctgctcaagaggctgaggtggaaggatggcttgagcccgagagtttgaggctacagcaagccatgatccactacactccagcctggccgacagagcaacacctgtctcaataaaataaaaaaataaaaaaaagttggttcactaaagatggcaaggatcaggcttcgcagcagatgtgggggtttgcccagccccgatggagcgagccatcctaataacagctgtacagtttcgtggattgtccagtgtgcacactgcacatgccttcatgtttagtcgtctcaggaacacaacagggtgggcactgcgactgcccccggttagagaggaggacgatgaggcacagaaaggttgtcacttgtcccaggtcactgctggtgagcagcgtaatcaggatatgaacggagccctgttgggtcccagaacccctccataagctccacccacaacccctcacccacagagtgtgagcgtttcccaggcctcagagcacccaggttgggagggttgcctccatggtcaccggctgcccagagactgtgcctggcccagggttttagcatgctctcacgctgtcccctgcccagcatgtcaagtttggggtaggaaggccagcaggtcaccgagggctgatccagagaactaggggacaggatcagggcctgctgagggcagagctggggcaggagaatgcaggggcagccaggatggggaggaagctgccctttcacctgtgcatgcattcaactgatgatgccaccaggctgggcgccagggataccgggtgagccaggcaggcatgttttctgccttattggagctgaaagtctggtgggagaattggacaattacagggacacgatgatgataaaacattaacagtaatgccgagtatgaagtggaaactaggctgggcacggtgtctcatgtctgtaatcccagcactttcggaggccaaggcaggcggatcacttgaggtcaggagttcgagagcagcctggccaacatggtgaaaccccatctctactaaaaattagccaggcatagtggcgggcacctgtaatcccagcggctcgggaggctgaggcaggagaatcacttgaacccgggaggtggaggttgcagtgagccgagattgtgccactgcactccagcctgggcaacagagcagtctctgtctcaaaagaaaaaaaaagtggaaactgtcacagtgtgcagaaggagatttacagggtttggggggcatctctgagcaaatcacatttcaggtgaggttggaataatgcaaagaagtcagtggggatgagaacattccagggaaagtgaacagctagttggagaccctgaggtggtggcgatgaggcccatgtggtgagaactgagatcagggaggggacgggcagagtatgtggagcctcttgggccacggggaggcggttgtcctgtactgagagtgggacaggagccgcaggtctcagtcttctgtgcagaggaggggcaggatctgactcgggtgttcccaggagcccctggctacagattactgtcaggtggggtgggagcaggaccaggtggggacagaggtaggcggagatgcacgattctggatatagtattttaaaggcagcgttaaccaaatttcttgatgatgcctagttgtgggcatgagagaagtcaaggatgccacagggggtttggccacagcagctgaaaggagaagccatgaactgagcaggaaaactgtgggagatgcaggtttgggggaaggtacagcccttggcttggccttggccatgttcagtgagaggtgcctgatagatacccaagtggaggtgctgcagggcagccgagttcaagtgtcaagtcaggggcagaggtcagcccagaggtagagcactggagttgtccgttgtctgtggtttttgaggccggatgtgactgccatgggcttcgctctgtagaaatgtggtctcccagagtgactgcccacctcccggggagccagcaccttctgggtgtataaaaatgccccaaagaggaaaaccatcaatggaggcagagcaggtggacaaagaggccagcctccccactttctcgcatccatggttccccagtgaaagccacacacgcggtgacaccctcaactgagactagaccacatccagccaggccattctctgcagtggccctgagtgccctgcctggtcacccgggccaccttccccagcaggaacatgggcccaagagtaccctgggcttgcaccggaggtggcagtgtgattgcaagctcggggtcccacaggcctggtgggcagttctgagttgggcgtatgcttggtgtgtggcctcagcagtgacctcctccccctcagcctcaggtcccactcctgtagtggacatcctaggtgtctctccttccagggcagtttgtggggggtccagtgagataatgccggccaagcccacggcccatcattaggagaacaagagctcctgcccatcgggcactcactctccaccactgccagcattgccgttgttggtgaagccaagggaggaggcagggcttgacagcacaggtgctaaactaggccaatccgagccacacgtcctgcctggccctttcccactgtgcgaccttggaccagctgcttaacctctccgagtcttgttccacatctatcggagatgctcctgatacccacttcacagtggtactgggaggacgcagcagggtaatgtatgcagagtgcttaccatagcgcctgacacagaacacacgcttaatgggaattatcattatgttaatgatcttgaataccatagtgatcaaaagtcagctttggggttaaatcaccggcgttcagctcctcagttagtgcatttgtaatttccatagataatatctaaatgccctccactggggttggtcactttttatgtatgtctttatttattttattttttatttatttttttgagacggagtattgctctgttgcccaggatggagtgtaatggcgcgatctcggctcactgcagcctccacctcccaggttcaagcaattctcctacctcagcctcccgagtagctgggactacaggcatgtgccatcacacccagctaatttttttgtatttttaggagagacagggtttcaccatgttggtcaggctggtcctgaactcctgacctcaaatgatccccccatcttggcctcccaaagtgctgggattacaggcatgagccaccgcacctggccaatttttttttaaggtcagcaagatacttggtccaggcatactgactaggctggagaggttaaaccagttgacatccagagcagctgctactcttttttttttttttgagacggagtctcgcttagtctccaggctggagtgcaggggtgcgatctcggctcactgcagcctcctcctcccaggtccaagcgattcttctgcctcagcctcccaagtagctgggactacaggcgtgcaccaccacacccagctattttttgtattttttttagtagagacggggtttcaccatgttggacaggatggtctcaactcttgacctcgtgctctgcccgcctcggcctcccaaagtgctgggattacaggcgtgagccaccgcaccaggcctgacatccacagcagccactactcttaaacccgcttcacctttggaccagcaattccaccagtagcactctctgtcccacacacaatcccacgcttgctcaaagtcgcatgtagagggaaggccactgtagagggaagactgttcaagataacctaaatatccatcagtaggaaactggcaggtcattgatgtacattcacttagtgcaatactattagggtaacatcacattcaattatgtgaagacctatggtgaagatataaagagaaaagcaagtatagacatattacaaagtgaaaaattaagttgtaggacagtgtttattattattccatttttgttttttaaaaaagttgtgggccgggcacggtggctcacatctgtaatcccagcactttgggaggctgagatgggtggatcacgaggtcaggagttcgagaccagcctggccaagatggtgaaaccccgtctctactaaaaatacaaaaattagccgggcgtggtggccagtgcctgtaatcccagctactcaggaggctgaggcaggagaatcacttgacctgggaggcagaggttgcagtgagctgagatcacaccactgcgctctagcctgggtgacagagcaagactccgtctcaaaaaaaaaaaaaaaaaaaaactatgtacatacaaccaacaaaggattgctaccttgcatatgtaaagaactctactaaccaataagataaaagatagtttgggccgggtgcggtagctcacacctgtaatcccagcactttgggaggccgaggcaggtggatcacgaggtcaggagttcgagaccagcctggccaatatggtgaaaccctgtctccactaaaaatacaaaacaattagctgggcatggtggtgccacacctgtaatcccagctgcttgagaggctgagacaggagaatcacttgaaccctgggcagtggagggtgcagtgagctgagatcataccactgcactccagcctgagcgacagagcgagaccccatctcaaaaaagacagtcaagctcatagataaatgggtaaaggaggctaggcatggtggctcacgcctatcatcccagcactttgggaagctgaggcaggaggatcacttgaggccaggagttcaagaccaccctggatgctgtagcaagacctcaaaaaaaaaaaaaaaattagccaagcatggtgatgcacacctgtagtcctagctacttgggaggctgaggcgggaggatggcttcaacccaggagttcaaggttacagtgagctatgatcattccattgcactttagcctgggtgacagggagagagggaaatgggatattgcacggcttcagtgaggccctcagaacggtgtctggcacatagtatgtgctgagatgtattctctgttactgagtgttgcactccaaggtgtaaattgatggggtcatgccgtgggtgagcagacagtctggcaaagggtccagattcttcaggccctggcctgagtcactcctaaccactggtgtgtctcctgttttcctacagagcctttgtggcatgtgcctgcccaggccaggctctcagccatagccggaagcagcgggaacaagcacccgtccaggcaggatgcagcaggcaaagattcccccaacaggcattccaaagtgagtctgggccccaccctgccctaccgggggagccaggcctgcctgggtgtggcctctgagcttcacacttgagcacatcctcaacctctgccaccttccactcagcagaggggttgaatacttggtctgagttggaaccaaccaggttcacattctggctccagccctcatcagccaggtcatctagggcaaatccctttacctcctcgagccgcagtttcctcattgttccatcagtcatggtaaatcagctgctgtaacagacagccccgaatctcagtgacttcatacagtggaagtggatttccctctcctgtaacagcgcagtgcaggtattcagtgagcatctacccgccattcacgtggtgattcagagcccaggctccctccctcttgtggctctgctgtccctcagaggttccaagccctctgctgggtccctgcgtctttccagcagtggaggtgagtgggagaaaagatcacatgggaggtgttttttagcccaggcctggaaatggcatgaatcgcttccattccatcacgtggccacacctagctgcaagggaggctgggaaatgtagtcttgcatggcccaggaaggctggggatgtagtcctgtgtgtccaggaggaggagatggtttgcaggggctcttggcaatctctttgtatccattcgttcagtgggtgtttgacaagcgcttacaacactccaggcattgggaccatgatgatgaagaggacagaccagccctgtcctcaggaagctgacttcccatttggggcagcaagcagtaagcagataaacagatctgttgtataagaaaaagtgcgggctgggcgcggtggctcacgcctataatcccagtgctttaggaggccaaggcggacggatcacctgcagtcaggagttcgagaccagcctgggcaacctagtaaaaccccgtctctactaaaaatacaaaaattagccaggcgtggtggcaggaacctataatcccagctccttgggaggctgaggcacaagaattgcttgaacccaggaggcagaggctgcagtaagccaagattgcaccactgcactccagcctgagcgacagagtgagactctatctcaaaaaaaaaaaaaaaaaaaaaacagtccaggggagagagtgacaagcactgcagctcaaggatgatgtggtcagagagggcctttgagggggtgacctttgagcggaaaccttgagtgaaggaagggggaggcccacgaagatctctcagggaagagtattgcaggcagagggagcagcaggcgcagaggccctgacggggagtgcccagtatgttccgagaatagcaagggggccaccatggccacagcaacgtgatcgggagggaggggagatgaagttggagaccgggacccaagcatcaaagccccatgggccatgctgggaactctcacttgtgcctggagtaagatggagccacaggtgggggtcatcatctaactcaggtgttctcagccttctgctggctgcgtgtggggaataaacagggggatgagggtgcagagagaccagggaggaggctgctgcactggccccagggggaggacaggacaggcatggacaggaccacgcggagccgtggagcaggaagtgacaggtcccggatctgtgttgaggacgcgggcagcagggtttgctagtgggctggacatgagtgagagcaaaagcggggtcaaggtgagtccacggctcttggcaggggcagctgaaagcatggccggcgtcattgagatgaggaagacgctgccgaactcagtcttagattcgctgagtctgagatgtgggaagcatgttctgtgcctgatgtcatttgttcctctgagcagccccatgaggcaggcttactatcaccctccattttacagatgtggaaactgaggctgagggaaggtaaatcacttgcccaaggtaacacggccagtagatgagaagccaggatttgaagctgtctggtcccagggttcaggcccaggcagagggaggacccggcaagggaagatgcgcccctgccctggagtctgggaatgacacgcttctcttgcctctcagggagaacctcaatactcaagtcattccagcagcaacaccctctccagcaacgcatccagcagccacagcgacgaccgctggttcgaccccctggaccccctggagccagagcaagaccccctctccaagggtggctctagtgacagcggcatcgacaccaccctctacacctccagccctagctgcatgtccctggccaaggctccacggcccgccaagccacacaagccccctggaagtatgggcctttgtggcgggggtcgcgaggccgctgggaggtcccaccacgcagacaggcggcgggaggtctcccctgcccccgcagttgccggccaaagcaagggctaccgaccgaagctgtactcctccggctccagcacccccacgggactggcggggggcagccgagacccaccgaggcagcccaggtaagctgttgcacctagtctgggttctaaccaccttccacttcgccagttctacttttacggtcctgatggtggggttctcctccccagaaacacactcacggatgaatgcgcctagtcattggtttgctgacagaattgaggagctcgtggatctctgccttattgcccatccatcagcattcagggaccccaggtggagggaaagaaacccctggccttctgtctctgttttcatctgtctctggttctctctgaccctctgtctcttttttctttgctctctgctgataccaaaagtttttatgctttctaaagggtcacagactgtatctgatagagtgtatttggctggaggcaataggaaacctgaccctctgtggcttaaacaaatagaggtgtaacaaacagtcccctaacatgaagtccagagaaggcagagccaggctagtgctgtggcttgtggagagcctcaaggattggcactctgtgtctccctgctcggcatctttaccatgctggctcatgtctcacttgccttgagatggagctgtgctgcctggtgagtggcagttggggacagagaagaggggaaagttggaagcctctgagcacctttcccttcctatggagaaagcaaacactttcccagaacccctttcagcagctggcatcacggggccatcccagctacaaggaggtctggaaagttgtagtttggtcttccaggctctaccgtatacggcgatggtccccacagaagccctcaaaggcttgttcagcccagctgctggcccccacccagagtttctgattcaataggtcggagcgggagacctgagaacgtgcattggtgtttttttgtttgttttttagacggagtttcgttctattcaccaggccggagtgcagtggtgcggtctcaggctcactgcaccctctacctcccaggttcaagtgattctcctgcctcggcctcccgagtagctgagattacaggtgcccaccaccatgcccaactaatttttgtatttttagtagagacagggtttcaccatgtcggccaggctggtctcaaactcctgacctaaagggatcctcccacctcagcctcccaaattgctgggatcacaggtgtgagccaccatgcccggctgagaatatgcattaagttctcagtaaatgctgatgctgctggtcccaggaccacactttgagagccactggtagagaggcagacgggagtaagagagaaagagtaggcattggctggaaacggtggctcatacctgtaatcccagcactttgggaggccaaggcgggtggatcatgaggtcaggagatccagactgtcctggccaacatggtgaaaccccgtctctacttaaatacaaaaaaaaattagccaggcatggtagtgggcgcctgtagtcccagctacttgggaggctgaggcaggagaatcgcttgaacccaggaggcagaggttgcagtgagccgagatcgtgccactgcactccacccaggcgacagagcaagactctgtctcaaaaaaaaaaaaaagaaaagaaaagaaaagcaggaattggcgagccagcagcctagagtcccgaccacacacactgacgttcggatggaggcaatgagccaccttccagaaaagggcacagagatggaaagagtattctacacagacacagagctcagcctcatccttggacccccttagggttctgtgaccccagcagggcttgctgtgctgtagtgtccagtgccagcccctgagtccacagccccacatcccttcctgaccatgcctggggtgggctagcctgagtccccgatagccatcagggctcagaacctggttggcgcagggatcttcctctcctgtggcgccctaaagccttttccagtcctcaaaccccagcctctctccacacaggacacccacactcaggcagccaactcagacttctgaccacagtccacagtagaattgtgtccatctatacagaaatatctatgttaaaaaaaaaaaaaggtggctttgagcagtggctcacgcctgtaatcccagcactttgggaggccaaggcaagcggatcacaaggtcaagagctcgagaccgtcctggccaacatggtgaaaccccatctctactgaaaatacaaaaattagctgggcgtggtggtgggcacctgtagtcccagatactcgggaggctgaggcaggagaatcgcttgaatctgggaggcagaggttgcagtgagccaagatcatgccactgcactccagcctggcaacagagcgagattccatctcaaaaaaaaaaaaaaaaaggtgaagcagtggtttccaaaataattcttaacctgtgtgtgatatactttgatccagtctactctatttaaaaacttttaatgctgatcaatccccactcagatgatttcatggcttacagtgttctctgacagatatttgaaaaccactgtgtttgagtgattgtagtgtcagcacttccccgggcacactgtgatccaagggtctccttgagtcaaagagccaggagaagggctgaaggaggaaagaggagacagacagagagagacactgtctgagtgttttagacctctcagttcatctccctagacaagtggctgtttgttttttagaaacagggtcctgctctattgcccaggctggggtgcagtagtacgaccatagctcacgatagcctcgaactcctcagctcaagtgttcctcccacctcagccccctaagtagctgagactacaggtgtgtgcccccatgcccagctaattttttaagtttgttagtagagaaggggtctcactgtgttgccaaggttggtctcgaactcctgggctcaagcgatgctcccatctcggcctctcaaaatgctgggattacaggcatgagctaccacacctggtgacgagtacctcttaatcttttgaacatgtggactcttttgaatggctctttcattcatttattcattcactccattcataagtatttcttagggatttgctcggtcccagacactgtgctgggagctgagagaaatcaggagcacatttggatgaggcctccccaccgcccactgtcaaatgagggaagcagatgagaatcagataatcactgagacaaatgaatacgtgtgcgctcccaggccgggcacggtggctcacgcctataaacccagcactttgggaggccgaggtgggcggatcacctgaggtcaggagttcgagaccagcctggcccacatgatgaaactccgtctctactaaaaatacaaaaattagccaggcatggtggtgggcgcctgtaatcccagctactcgggaggctgaggcaggagaatcccttgaacctgggaggtggagggtacagtgagccaagactgcaccactacactccagcctggggaatagaatgagactccatcttaaaaaacaaaaacaaaaacaaaacaaaacaaaaatacattgcactccagcctgggtgacggagtgaaactctgtctcaaaaaaataaaaaataaaaataaaacactgtggaaaaaaaaacaaaaacctgtgccacgaagagggacatgaagccaagagagtctataccaggggcctcaggtctcgattgcagtagcccccattccaggcatgggaccaccaccttagcgaacccgaacaactgggaggatttgaaatccgagacataaagacagccaggcctggagtagactgtggctgagatgggagggtgggtatgaaataaccctgtgtctaaggaaaggatctgctgaacccagaaatgaaggcaatgaaatgggagaggagcccgctgcagaagagggccctgcggttgggagctttaatttgcatacagacaattgatgctaattgcaaatcattcttatctgctcattaaagctgcttcctgaagttttctcctaggcaaccaggcttgagtgtggcacagcatttcccaaaatggggtgcttgaggtgatttgggtggtgcggggaggaaaatgttttattttaaatggatatatgcttgctttcatgagtattaggaaaaagagtttgcaactcaccccctgattttacagataccaccttggacaagttaaggagaaaataaaatgagttgatttaaaaaaacatatccaggcccggcgcagtggctcacgcctgtaatcccaacactctgggaggccaaggcaggtggatcacttgaggccaggagttcgagaccagcctgaccaacacggtgaaaccccatctctactgaaaatacaaaaattagccaggcgtggtggtgcacgcctgtggtcccagctattctggaggctgaggcgggagaatcgcttgagtctgggaggcagaggttgcagtgagccgagatcacgccattgcacttcagccttggcaacagagtgagactcagtctcaaaaaaaaaaaaatccatgtggataagagtgtggcctttagtgtcagcccacctgcattcaatccctccctcagcgacttcttggctgtgtacccccaggcaagtaactgaacctctctgggcctcagtttcctcatctgtgaaactagggataaaccacatacctacatcatagggatgtggtaaagattgaatgtacccttagaacagtgctttgacttgaagactgcctgtcagaatcatggggtatgagggtgtatttgaaaaacacacagaaatgaggccttgcctcaaattcacgaaatcagaatatcccccctggtccaagacctgttacaggcagtgctggggacacagcggtgactgggggagccccagtcctgcctgactgacgcattcccagacagagacagcccagaggggtcaggtcaagatgggcgaggcccaggcagaggggtcagggtcagggtggggggcccaggctaaggggtcagggctgggatacaaggcagctgcgaagaggggtcagggtaagatgaggggcccaggtagaggggccagggtgagatgaggggcccaggtagaggggccagggtaagatgaggggcccaggtagaggggccagggtgggctggaggggggccaggcagaggggttggggccatgatggaggggtacagggatgtgagagcccaaagggggcccccctaacccagttgtgagaggggccagcccagttgtgggaggggctttcctggagaaagagtctgagctagccagggaagtcaggagggaaaagcagtccagacagagaatgagacggactcccactgtccatctcaccccacctcactccattggcctcccacagtcttcccatttcagtaggcacaagttccctggatggtcacagagccacctgcttggggccagaccttggttcaagtggccacacgtgcctctgcctcccatggcggccacactgcactgtgcaccgggcagcccagcagcccccctcatgtgctgtcgtcagaacgtgcccctgggctggagtgacagcctgctccccagcctctgctcctggaaggcaggcacctttgaacaggcccagcatgagcactcattgactgccctatgtctacctccacagcactctgtggcatagaacttggtatttattcacacagcgagcgcctgctgtgcaccggggcctctgcagggagctggaacaggcagaccagatccccaccgtcctggtacggacggaggcccatgggaaacagctagtgaataatgccaaaagtcatgaatgaattgtgccaggggacagcctgcagagacgggtggggtctgagggtggatgggatgcagagctggaggaggtgtctaatctagcctagggccagcgataatgttcctgaacgagggtcacatctgccaaggatgagggggacagggaggagggagcgggtgaaggaggagaggggttcagtggggctggagagacattcatctgggatgcagttatacaggtatttgctctgtttttgaaattgtgtgtatatatgcaacatatatatagacacacacactttctgggcctcaatatatgttgtgaacctcagtatgtatatatacaactatgtatatatacacacatatgtttttttttaagtctgttgaatttctcattcagaagaatgtatatatgactatttaccattaacaaaaaaacagaagggaaagatgaggcgtggagaaagtatgtctatgaattagagttgcgtgtgcaaagtccctgtggtagggaggagggtggtatcgtcaggccactgaacacaggcccttgggctcaagtatagaaattgtggctgggcacagtggctcatgcctgtaatcccagcactttgggaggccaaggcaggagcatcacttgaggccaggagtttgagaccagcctgggcaacatagacccatctctatccccctaccaaaacttttttttttttttttttttttttgagatggagtttcgctcttgttgcccaggctgcagtgcaatggcacagtctcagctcactgcaacctctgcctcccaggttcaagcgattctcctgcctcagcctcccgagtagctgggattacaggcacctgccaccacgcccggctaatttttgtatttatagtagagacagggtttcaccatgttggccaggctggtctcgaactcctgacctcgggtgacccacccaccttggcctcccaaagtgctgagattacaggcatgagccaccatgcctggccaaaaatttttttaaattagctgggtatggcagtaggctcctgcagtcccagctactcaagaggctgaggtgagaggatcacttgagcctggaagttcgagacagcagtgtgctgtgattgcaccactgcactccatcctgggtaactgattgacaccctgttgatcaatcaatcactccatcctgggtgacagagcaaggccctggaggtaggtaggtaggtaggcaggtagggcagccaatgggaggttggggaaatcagcagtggccagaacattcagggccctaccagctccattatggagtttggatctcatcttaagagcagccagggtaatgcgggtggatttgtgttccaaaatatggtgctggcagcgagacaggaggcaaagtctctgagggggctgaggcttggatctgcatgggaggacgtgggcctgagctggaggacaaagcaactgtggatgtggcagcaggcggcattgccaggaagtaagctgggagggagatgcaggcccagggcagagccagcaagccatgtgagagtccagggtggctgccacgtgtctggaggctgccgtggcctgggagcacctgaggtgcttgtgagaagaggaggcagagtggggcagccagcggggactgattcttccagtcactgacctttgcagcccctactctgtgccaggtgtcgcagcatccttcccttatggagctgtcattctcctggagacaggacaagacagacagacagccgaaccaccgtggagtgtgccaggaggtgataagtgctggggaggaaaggcaaaaacagcgggtctctgggaaggcttctcaggaggtgatgcgttgtaggaagccagggtgagatccaggcagtggaaacagtagatgactagaccctgagggtgaacttactctcaatgctccagaaatggtcaggtggccagaggggctgaagcaggtgggatggggggagagtggcaggaggtcagcatagtgaggtggcaggagcctggttctagcgggcatattgaccaaagtcagatgctgggatttggttccaagggacatgggagccatgggaggcatttgagcacatcatctgacttaatgtttttaaaaagattactgtgggctggacgtagtggctcacacctgtaatcccagcactttgggaggctaaggcaggtggatcacttgagcccaggagttcaagaccagcctgagcaacatggcaaaaccccatgtctacaaaaaattagctgggtgtggtggcacacgcatgttgtcccagctacttgggaggctgaggttggaggattgcttgaccccgggaagtggaggctgcagtgagccgagatcacatcactgcactcagcctgggtgacaaagtaagaccttatctcaaaaaatgataataataaaatgtaaaaatgaaaaaatagaaaagatcactgtgggctactctggagaggacggactatcttgggcagggggaggatggtggtcagcattcaaaggctgccaggagagggatgggtcctgacacgcccaagcggggagccccctaccctcccttccccgggctgcggcccttgccgtggaagcaggtgcagcctgtagcagcttgtgcccatcgatgacctcacagatgctccctccagacattcgtcatgggagcccagctgccaggcatgctgccaggcgccagtgcctgccatgggcaccgcagtgggctgagtgatcctgggcgggcagccacctggccctcgccctctcctgaggcagcacgcactccagagctttctgggcttccagagcaatttgtcagagctgttaggagcagtcataggctctcggctccacatggagctgacgcagccgggcgttcccaggcaggcaggaagcacgtggccttgcttccccaggctgcgccaggagtccctgggatgcccttctggggacacagccctgaaaggtaatctgagggcctgaagatccaccggggcccaccctgcctgtgagtgttgggaggctggggtcacctgagacagagacctcctcggagagtcacagcttgggaagaggaagcgaggccgtctcctggaactcaagggagtgcggaagccaggcagagatctgcagggcggggagcagtgcaaaggtcccaaggtagcagtgtttctgatgtgtttgaggaacagcttccgcatggctggagcagagtgaaggagagggagtgtggaggagctgggggcagagaagagaggggggcagatggggggccctgtcgggagggctctgggtcttacccagagtgaggtggaaccctgagagagtcctgatctgattcacatgttcccaggatctctctggctgtgtgctgaggctggggaaggatgcaggaggaagagggagccaggaggaggccgctctgacaatacaggtggcagtggttggtggaggtagcgagcagtggcttgattggtatctctgttgaatctcttgcctagaccctctctgtgtctgcttcctgaagacccgtcgcttctgccccacaggccacaggggcaatgtggctgcttacggctcctacactggagcacaattccagccgcatgcagggatgaattggttctccagcccatgacacacgtcagggagagaaagcaagattggtccagggtgaaggccaagtggctgggggccctcggggtatgtgggtgagcagtgtgacttcagggctcttcctctgactgcctatgtctacatcacagctccacctcttaccccaactgcgtgatctctctcaggccccttaggtgctctgaggctcaatgtcctcatctgtaaaatgggggtaataggatctgtcaaccagacacggtggctcgcctctcatcccagcactttgggaggccgaggcgggcggatcacctgaggtcaggagtttgagaccagcctggccaacatgatgaaaccccgcctctactaaaaatacaaaaattagccaggtgtggtggcgggtgccagtagtcccagagactcgagaggctgaggcgagagaatcacttgattgcagtgagctgagatggcaccactggactccagcctgggtgacagaactagactctttctcaaaaaaaaaaaaaaggatcctccatctaaagttgtgagggcgaactgagaccatgagtttaaagcacttatcacaggactggagacatagctgggctcaagtgtatcagctgctgctgtgttttattctcatgtattatgtattgatatttatcgttaacagttgttgtcactgggagtacagaatggtggttaaaatatcgtctctcaaaccagactacctatgtctacatcctggctcttatcccccactagctacatcatttcgggcaagttatttcatctccctgggcctcagtttcccccacctggaacatggaggtggtggtagttcctgtctcggggttgctacggcggctaagtgaggtgacgcctataagatgcttagaacaaggccaggcagcttccacaggctcagagtggtcagcactgtcactgccacctactgtgccactgctcctcctggaggcagggaccacagctcgctccctgagagcctgtcacccacccaggaccacccattggtccccttcagagtccccaggctgaacagaccaaaagcattgcacacacttatgcagctggtatgatttctctacccagcctctggtttttcagctttttttggaagcataaatcctttgactccaacaaaatgttaaatgctcccctaagatgtcaagcaggttaatgcatagctctctggttgaaggtgaggatggaagcacagagcacgttgcctgcccctcccccgctaccaccagtgctgtctgagcccagagcccagggacccaccacctccctggcacctgcagctccgcggttcctcctcaggactcagtgctgagcacttagcacataggatctcgtgaggcaggtgctgtcattgcctcatttctcagaggaggaaactgaggctcactgaggggaatagaccccacgcaagttggccactgtgttgatgggagccaggattggaactgggtcaggtggacagcaaagcccacactatgctgccccagttttcaagttgatattgagacttcaggaggacgcatgggcacactggcgctccagaaagaaagaacgttcaggctgggcgctgtggctcacgcctgtaatcccagcactttgggaggccgaggcgggcggatcatgaggtcagaagttcaagaccagcctgaccaacatgatgaaaccccgtctctactaaaaaatacaaaaattagccaggcataatggtgggtacctgtaatcccatctacttaggaggttgaggcaggagaatcacttgagcctcctgagtagctgggattacaggtgcacaccgtcacacttggctaattttttttttttttcaagtacagatggggtttcgccatgttggccaggctggtctcaaactcctgacctcgggtgatccattcgcctcagcctcccaaagtattgggattacaggcgtaagccactgcacccggctggccacttactttttaccctgtgccatttatgtagtttaattagactttttttagggttggttttttttttgttttttttatttgcttgttttttgttttttttgagtgatggggactctgtcacccaagctggaatccaatggtgcagtcatgcctcactgcagcctcaaactcctgggttcaagcgattctcccacctcagcgtcccaagtagctgggactacaggcatatgccactatgcccagcttaatttgacttttattccgtacatgttccccatcattactactttcagagagaatccattagtgtacactcctccagagatttttctctaaacctttaccaacccagttctttcaaacataccacttaggccaggcatggaggcttacacctgtaatcccagcactttgggaggtcaaggcaggtggatcacctgaggtcagcagttcaagaccagcctgaccaatatggagaaaccccatctctactaaaaatacaaaattagctgggtgtggtggcacatgcctgtaatcccagctactcgagaggctgaggcaggagaatcgcttgaacctgggaggcggaggttgcagtgagccaagatcatgccattgcactccagcctgggcgacaagagtgaaactccgtctcaaaaaaacaaacaaacaacaaaaaaacaaacaaacaaacaaaaaacatgccacttaacccttaccttgcaagaaatacagtgactttttaaaaattctagtttagctgggccgggcgcggtggctcactcctgtaatcctagcactttgggaggccaaggtgggcagatcatgaggtcaggagatcgagaccaccctggctaacacggtgaaaccccatctctaccaaaaatagaaaaaactagccaggtgtggtggtgggcgcctgtagtcccagctactcaggaggctgaggcaggagaatgacgtgaacctgggaagcggaggttgcagtgagctgagactgcgccactgcactccagcctgggtgacagagcaagactccatctcaaaaaaaaaaaaaaaaattctagtttattttgccaggcgcagtgactcatgcctgtaatcccagctctcagagaggcagaggcaggaggatagcttgagcacaggagttcgagacctgcctgggcaatttagtgagaccccattccccacaaaaagggggaaaaaaggacaaaaaaaagtataaaattctactttatttctttttttctctatacatatgtgtgtatatctatctatatattttttcccttaaatacacagaatcatgttttataccatgcatcgtttccatttactatagttcagaccatctgtcctcatacataaacagagattgacctttgcactggctgcatagtttttgatcataaggatatgcttgcggcagggcgcagtggctcatgcctgtgatcccagcaccttgggaggtcgaggcaggtggatcacttgaggccagaagttcaagaccagcctagccaacatggtgaaaccccgtctctactaaaaatacaaaaattatccaggcatggtggtgaatgcctataatcccagctactcaggaggctgaggcacaagaatcgcttgaaccccggaggcgcagaggttgcagcgagccgagatcacaccactgcactccagcctggccatttccaacttttcctgattataaacagtactacagagaccgtcctcatacctgcctgtgtgtgcttgtgcaggcttttggtgtgtgtgtgtgtgtgtgtgtgtgtgtgtgtgtgtgtgtgtgtgtgtgtgttttgtagctaagactatgggactatgggcatgtgctattattcctggctatttttatttttttgtggaggcagggtctctagggctgggcatggtgcctcacaactgtaatcctagcactttgggaggctggggtgggaggatcatttgagccccggagttcaagaccagcctgggcaacatagcaagaccccgtccctagatagagtctctacagcaactcctgggctccagcagttctcccacctaagcctcccagagtgctgggattacagcatgagccaccatgcccggccttgtgcaggcttttctattgcatggatttctgggaggccaaatgtcttgtttttgtttttgagatggagtctcactctgtcgcccaggctggagtgcaatggtgcgatctcggctcactgcaacctccgcctcccagattcatgccattctcctgcttcagcctcccgagtagctgggactacaggcgcccaccaccatgcccagctaatttttttgtatttttagtagagacagggtttcactgtgttagccaggatggtctcgatctcctgacctcatgatctgcccgtcttggcctcccaaagtgccgggattacaggcatgagctaccacacccagccaggccaaatgttaagctgaagccagtcatccttcagttctcagttctgatgctcttgtctcctggggaaagcattcctgaccattcttggtgttacatgcttcagtagttccctggacatctcctcaccaatgcctactctttgctccattgatagatgttgctaaattgtggaaagcattacatagttgctgtttcaatccagtcggacaatccctgccttttgatgggagtgttcagaccattcacgttaaatgtaattattactgctaatggttggatttgcattagccattttgctattgtttctgtatgtctactatctttcttgctcctctgttcttccttactgccttatactgtagtaaataaatacagtttcaggccggatgtggtggcttacacctgtaaaatcccagcactttgggaggcccaggcgggcagatcacctgaagtcaggagttcgagaccagcctggccagcatggcaaaaccctgtctctactaaaaatacaaaaattagctgggcgtggtggcatgcacccgtaatcccagctactcaggaggctgaggcaggagaatcgcttgagccagggaggcggaggttgcagtgggccaaggttgcaccactgccctccagcctaagtgacagagtaagactctgtctcaaaagttaaaaataaaaaatatatataatttagtataacatttggattctactcttgtgtaactatctttttagttattataatgtgcgtctatcactgcaattcaggttaatactaaattccaataaaatataaaacttttctccaatattgtcctatttccttctcccttttttgtgctctgtttatcataaacatccatatgtgttttaacccagcagtatagtattgtcattattgccttatacagtcttatgtctttaaggaagttaagagaagaaataagaaagcatatacttttatagaatcttattttaaaccacagtttgccatcttgggctattcatttctgtctactgactcaggtcattgtctagagtcatttctttcagcctgaggactttttttttctttttttttagatggagtctcactctgtcacccaggctagagtgcagtggcgcaatctcagctcactgcaacctctgcctcctgggtttaagcagttctcctgcctcagcctcctgagtagctgagattacaggtgcccgccaccactcagttaatttttgtatttttagtagagatggggtttcaccatattggccaggctgcgagctctcctgacaggcgatccacctgccttggcttctcaaagtgctgggattaacccgaggagttttaaaattattttgtatcaggcaggtgtgctagcaacaaattctctccatctctgtttatataggaacatctttctgttgccttcatttttcaaggatggttttgctgggtatagaattcctggttaacagttgttttctttcagcactttaaaagttacattttatttcattcttttaaatgagaagtcagcaattaattgtgtttttttttcttttttatagaagtggggtctcactgtgtttcccaggctggtttccaactcctgggcttgagtgatcttcccgtcttggcctcccaaagtgctgggattataggcctgctaattgtattgatgctcctctatatgcgatgcatcatctttttcttgatgctttcaagatgtttatcttagcatttttctttttttcttttctttttttttttttttttgagacaatttcactctttttgcccaggttggagtgcaacggcataatggcgtgatctcggctcaccgcgacctccgcctcccgggttcaagcgattctcctgcttcagcctcccaagtaactgggattatatggatgcgccaccacacctggctaatttttttgtattttagtagagatgtagtttctccatgttggtcaggctggtctcgaacttctgagctcaggttatctgcccgccttggcctcccaaagtgctggaattacaggcgtgagccaccgcgcccggccagcatttaactttcaactccttttctaggtgtgaatctctttgtatttttcctacttggtgtttgttgagcttcttggatgtgtaaggttttcatcagatttaagaagtttccaaccattatttcttcaaatattttttctgccccttctctcctctccttccaaagttcctgatgcacatatgttggtacccttgataccgtcccaaaggttctgctctggaagaacttcttcactcactgagctgggaagaggtggggggaggacaaaatgcgacaaatttcctctgttcttccctaaagttcagtttctcaagcatacatgcttctcaaattgttgtatgtgtttggtcaattttcggagtactgaaatggtcatttgtggtcaatgttgtcatctctggggagatgtgccagtcttctcatttgactgtagtcaaagtaccatcctgtgatactgctaaattgaccctcaaaagggatttattaacttatatatataatcctagctgggtgtgctggcacatgccgtgttcccaggtacttaggaagctgaggtgggaggatcgcctgagcccaggagttcgaggccagcctgggcaacatagcgagaccttgtctctttaaataaacaaaaaaccaataatcctcccacccatcccccacaaaatgcccccttttatatacacatgcgtatgtttttgcatagaaaaaggttgaccgggtgcggtggctcacacctgtaatcccaacactttgggaggctgaggtaggcggatcatctgaggttaggagtttgagaccagcctggccaacatggtgaaacgctgtctctactaaaaatacaaaaaacttagctgggcgtggtggcacacatctgtaatcccagctactggggaggttgaagcaggagaatcgcttgaacccgagagactgaggatggagtgagctgagattgcaccactgcactccagcctgggcaacagagtgagactctgtctcaaaaaaaaaaaaaaaaaaggttaagggccaggcccagtggctcatcctgtaatcccaacactttgggaggccaaggcaggcggattgcttgagcccaggagctcaagaccagcctgggaacatagtgaaaccccatctctacaaaaattagctaagcatagtggtgcatgcctgtagtcccagctactcggaggctgaggtgggatgatcacttgaggctgggaggtcgagcctgcagtgagctgagatcgcgccactgcattccagcctgggtgactgagaccctgtctcaaaaaaaaaaaaagaaaggttaggaaggaaatagagcaaactgtaagccatagttccctgtcgagatgggcaggaggtaagatccccacctttagctgcgtaggttgtaccaaggagacgggagtgaatttttcagattcctatagaggaaccaaatgtgctagaaggccatccttgggtgggattaggcgctgtgcaggcagtcttcccttttctacagataggcgtctatactgttggaattttccacagcggtaatatatttgtgtctgtcttgtgcaaatgaacttttttgattcccaagagtaaacttcaatagctctgtcttgccaaatgtggaatggatttggttttttttatctctttcatttttgctttgcagtgacatgggctcgagggttggctaccccgctcaggtttacaaaactgccagtgcagagactcctcggccctcccagctggcccagcccagcccctttcagctctccgcctccgtccccaagtccttcttctccaagcagcctgtacgcaataagcacccaacagggtggaagagaacggaggagcccccaccacggccactccccttcagtgacccaaagaagtaagtgcctggacgtccagcgaggcgcccgccagatccacaccagggcgtctccggggcggaaagagggtgatgccacatgctgtcattgcacagacgactgtgggccagtgtaccagtgtacacactggggctgcagctgcaagcaggacaggcgagaacccctcttggggagctggcattccatttggggtgaccaacaataagtagaataagagaagcacgcaataggtcaatggtggttatccttgtgccatatccgggtgtggaacattccagggagaaggcatagcagctgcagaggtcctgaggcagtgagtgacacggttgcctgtgggcaggccggggtggctggaacagtttgggccaggggagggtgtgggaacatgaggtcagggagggatggggacagaccatggagggtcttgagggccacgtggaagggacttggcatcttccctgactgagatggagccacgggagggcatggagcagagagggggcaggatctaaattgggcattccagggtcgctgtggctgcgtgtggggaacagcctgcgaggagcagggaggagctgctgtcatggtccaggcgcagacgaaggggcgggagcagggtgggggcggagagggtgagaagggggcggttccggatagattatctgaaatggagcagaccgggcttgctggcagggtggatgtggtgtgagagaaagagaggggttgaggatggtgcgtcgtcttgaagcccggaggacagacttgccttgagtggggagcaggcttggggaaggcacagtagctcaatcctggatgcttcggtgcgagattcgcaggagacatccagacggaggcgtgaggggggcccttgagtaaggaatcccgaattcagtggagaggtcaggctggagggagaactttgggtgttatcagcctagagctgcgaggctggaagagcccctaaggcagggtgtggagagaggagaaatgtgggactgagactgaaaccccttgatgttgagccaaagtgagaagccggggaaggcggggaggtgcggaggcggagaggtgcggaggcggggccagggccaggagaggcggagctcgggcgaggaggctgggcccaggccagggtgatgagactgagaaccgactatatagggttaatcctcccagaggtcgccggagggttcaggagaaaagggtgaggcagaattgaggagctgcgtgagcagttcatttggggcattttgctttaaagtgaaagaggagaggggtgtgcagttgagaaagggttttgtttttcagtcggaggatacaggagctaacattgcctgagcactcaccacatcgaggttcagttctaagtggtttgatgcgaatgaatttactggatcccacaacagctccatgggggtggacctgtcctccccccaccccacccctttttttttgagacggagtttcattcttgttgcccaggctggagtacaatgacgtgatctcggctcactgccacctccgcctcccgggttcaagcgattctcctgcctcagcctcccgagaagctgggattacaggcatgcgccaccaagcccggctaatttcgtatttttagtagagacggggtttcaccatgttagtcaggctggtcttgaactcctggtatcaagtgatctgcccgcctgagcctcccaaagtgctgggattacaggcgtgagccactgcgcccggcccctgtcctcccccttttacagatgaggcagctgaggcccagagtcacagggctggtgaggaacacagcctggatcagagcccaggaagcctgggtcaaggctcacgtctcttgagtgaggggctctgccctcctccatcctgttctttgtagtgtcatctttcatgacctacatggagacattcaaatccggggatgacacagagcttggagggagagacgtgtcaggagacagaaacagtgtccctggagatatcagcaggcaagtgtgctgagctcacactgagagccagaggggattctgaaaactagactgatgattaaaactgcttaaaaactcagcagcctccccatgctcccgggattaatgatgcaggctcacattgactacacacgtttataccaggcgccatgttctttgccgaaactcccgctcagagcctggatgatctgcccctcacctctgccctcgttcccatccactctcccctccttgctctgttccagccacactggcctcttgctgttcctcacactctccacgtccaggcacaccccagggcctttgcactggctctcactgctgcctccagtgagctccctccagatcttcttgggtgcagctcatgaggactcgctctaatgccaccccctcaaacaggtcctcctggccttcagtagcccaggctgtcattctgtgtcactgtactctgttccacatcccgtgtcccccatgggaaacaggtgccaccgtcttagtcacaaggcacttgtaacgtgcctggcacacagggcatgctccatcctgaacataagacgtgtggatcttgtttgattctcacgtgaccccaataagtagatactataaggcccccacttttcagtgtggcccaagttgggccctgctgaaccctgttaccctcctcaacaatcacccgtacacactgcttcctctgcctggaacccaccccccaacccgcacccccactctaggcccactcctgcccacccatgttaatttgctggggcagccgcaacaaactaccacacactgagtggcttaaactgcagaaatgtatcatctcacagttgcggaggccagaagtccaagttccaggcgtcaacagggtggttccctccaagggcggtgagggagaacctgttcctggcctccctcttagcagccggtgggtgtcagcacgtagattcatcacccccgtctctacctcctcttcgcatgatgttctccctgcatctgtgcccacatttcctctttctgcaaggacgccaatctaacgggattaggggtctaccctaatgacctcattttcacttgattgcctctgtaaagactctgtctccaaatgaggtcacatttggagatgctggggcttaggacttcaatgtagctttttgtggggccccagttcaacccataacaccactccttgggtatcaacacagacacgcctttcttgcagaagttgtctgaacccccacaccaggctcagcccacccccagcacctgtcccagggcacagcgaccgccactcccttggcaacttgcttcctctctgtcacccccatggggcccagaacagagacatcctgaacctcacccagaccacacacttagtaggtgctcagaagatgtacctggagagacaacaaccctatccaacaacagctttcccagtgatgaaatccagagatggcttgtatatgtgtgtgttggtgtaaacatatgtaaactaagcatataaaatatcagcaggagacacaaatgaaatcgcttcatagttccttttaatatttatttatttattaatctatttattttatttatttatttttgagatggagtgttgctctgttgcccaggttggagtgcagtggcgtgatctcggctcactgcaacctccacctcctgggttcaagcacttcttctgcctcagcctaccaagtagctgggactacatgcgcataccaccatgtctggctaatttttgttttgttttgttttgttttgttttgttcttcttaatttttgtatttttaatagagacggggtttcaccatgttggtcaggctggtctcgaactcttgacctcaggcaatccgcccccccttggcctcccaaagtgctgggattacagttgtgagccaccgcacccggccccttttcatatgtatttagttgcagatacattttaaaaatcacaaccaaggccgagtgtggcgcggtggctcatgcctgtaatcccagcactttgggaggctgaggcaggtggatcacctgaggtcaggagttcgagaccagcctgaccaacatggagaaaccctgtctctactaaaaatacaaaattagccaggcgtggtgtcgcatgcctgtaatctgttccacatcccatgtacagctactcgggaggctgaggcaggagaattgcttgaacccaggaggcggaggttgtggtgagccaagatcgtgccattacactccagcctgggcaacaagagctaaactctgtctcaaaaaaaaaaaaaaaaaaaaatcacaaccagatgcagtgtctcacatctgtaatcccagcactctggaaggccgaggcgggggaattacttgaggctgggagttggaagccagcctgggcaacaacatagtgaggtcccacctgcataaaaaaatttttttcagccaggcgtggtagctcacgcctataatcccagcactttgggagtccaggatgggtggatcacctgaggtcaggagtttgagaccagcctggccaacatggtgaaaccccatctctactaaaaatacaaaaattagccaggtgtggtggcaggcacctgtaatcccagctactagggaggctgaggcaggagaatcgctagaacctgggaggcagaggttgcagtgagacaagattgtgccactgcactacagcctgggcaacaagagtgaaactctttctcaaaaaaaagacaaaaggcactttgggaggccgaggcgggtggatcacgaggtcaggagatcgagtccatcctggctaacacggtgaaaccccgtctctactaaaaatacaaaaaattagccgggcgaggtggcgggcgcctgtagtcccagctactcgggaggctgaggcaggagaatggcgtgaaccccagggggcggagcctgcagtgagccaagattgcgccactgcactccagcctgggcgacagcgagactccgtctcaaaaaaaaaaaaaaaaaaaaaagacaaaaggaaaaaaaaacttttttcaaggcgagtggatcacctgaggtcaggagttcaagaccagcctgaccaacatagtgaaaccccgtctctacgaaaatacaaaaattagccgagtatgatggcaggtgcctgtagtctcagctattgggaggctgaggcaggagaatcacttgtacccaggaagcggaggttgcagtgagccgagatcgtgccactgcagtctagcctgggcgacagagtgagactctgtctcaaaaaaaaaaaaattgcatatataaaatattaacttagaattattatttttgttcatacattccccttgtatgtgctgtagctcactgagcattttggagacagtgtctttgttatcgtgagaggcacttttgagtcacttcacttctaactcaattattttagattaaacatgttttgttgttgtggtggtggtggtggtggtggtggtgacagggtttcactctgttgcccaagctggagcacagtggcatgatcacagctcactgcagcctctgcctcctggtacaagtgattctcgtgcctcagcctcccgagtagctgggactataggtgcccgccagcatgcccggctaatttttgtatttttagtagagaaggggttttaccatgttggccagtctggtctcgaactcctgacctcaagtgttccacctgccttggcctccaaagtgctgggattacaggcgtgaaccaccatgccaggcccaaaatttagacaacagaggcaactcagagatgatgtccagtcctgtcagtcagaacctggaggatgttttcttcactgaggttttgaaagataaaacatgcacaaggtaaaaaataaaatactacaaaagggtttgcaatagaaagtaagcctctcggccaggcgcggtggcgcatgcctgtaatcccagcactttgggaggccgaggcgggcggatcacgaggtcaggagatcgagaccatcctggctaacatggtgaaaccccgtctctactaaaaattaaaaaaaattagccgggcgtggtggcgggcacctgtagtcccagctactctggaggctgaggcaggagaatggcgtgaacctcggaggcggagcttgcagtgagccaagattgcgccactgcactccagcctgggagacagcgagactccgtctcaaaaaaaaaaaaaaagtaagcctctctcccttccctggccctcagccatcctgctccctccccaaaagcagccattgtttcatttctgcatccttccagaaatgttccaaacgtgactgcacacacatgattgtgtgggcttcccttgcacctgttttattaatgtggtcacctcctgcatatgaactacttcctcacttgctcttgctcttcaagtcttttttttttttttttgagacaggctctcactgtcacccaggctggagtgcagtggtgccatcatagctcactgcagcctcaacctcccgatctcaagcagtctcctatcttagtagctgggcccataggagtacacaaccacacccacctagttttttactttttgtagaggtgagatctcactgtgttacccaggctggtctcacactccgcactcctgggctcaagtgatcctcccacttacgcctcccaaagtgctgggattacaggcatgagccaccatgcctgacctaagtttcttggcaatagttccgtatcagtgtgtagaaagtgatgtcatttttggccaggcgcggtggcccatgcctgtaatcctagcactttgggaggccgagatgggcggaccacctgaggtcgggagttcaagaccagcctggccaacgtggtgaaaccctgtctctactaaaaatacaaaaattagccaggcgtggtggcaggcgcctgtaatcccagctactcgggaagctgaggcaggagaattgcttgaacctgggaggcggaggttgcagtgaggcaagatcgtgccattgggctccagtctgggcaacagagcaagaccctgtctcaaaaaaaatagaaaaagaaagtgaatcccacacgtgtccagtattagaaacgagagtttggtaaactccagtataccaagctgagctgtgtgtgagttttctaaaaatggtttcgcgctatacatgctgcttttttcacatgacgtcgtatctgggattgcctctgcacgccatgtggatctgccatgcgtctctggagggtgtgattctgggtggtgggcctggccctttcctggctgggggctgctgtctgctccacagacaggaccctgggagtgtccgtgcacatgtggcactgtggactcatgtgagcctttctgaaggacgcgtttccagaagtaggactgctagtgcagagagcaagcacattttattcatgcttccaggaggtcttggcacgcccctctcgaggggagcctgtgggcagtgcactggctggggggcgtgctgaaggccaggcctgcttcctcactgccgggagatgggcaccatgagccctgcactgagtcacactcccctgtgcagggcattctgggaaatattgaaatcaaaaggggtgggggagtccccttttgatttgtgtctgtctctctgtctctctatttctctcttttgaatctaaagcttttaatttgcccaaagaatacacatccctgataactgacagacccagcattaccctagacctggaattccaatttggggaggaatatgacctgaccaggaaaaaacctggccttgctctcgcccttcctttgttaaaatcccaaggctggcagctgagaaacagaaaaaggaaatccagtctttaaaaccctcgggaacccaagacatcttatttcttccccaggttcaaagcctctttttctttcttgcattacagaatgaagaagtccaggcaaaagcttttattaagctagtttttattatttttattgttataaccatgattatggttaagtaaattcagacacttcagaagaatatcagttgaaaagtaaaagtcccatttttccacctcctaataagattcctacctcccagaggttatcatggttcataatttcttccagaaattgttatctgcagacagaagcatatttttaaatccaatgtggctgttccccacaccatacgtgtttcctgccatctctgatatacacgtgacagtcaagcttggcagtggcgtgggtaggcactgcagcctggcggccttgatttgaaacctgactccttcacaggctgtgtgacttgggacaagtggctaaactcctctgtaccttaacagcctcatccatgagatgggataccaatagtctttaacatatatggctgtggtggggatcaaatgaatttataagctgggcatggtggctcatacctgtaatcccagcactttgggaggctgaggcggaaggatcgcttgagcccaggagtttgggactagcctgggcaacctagtaggaccccatctttacaaaaaaattagctgggtgtagtggcatgcgcctgtagtcctagctacttgggaggccagggtaggagggtcacttgagcccaggaggttgaggctgcagtgagctgtgatcacactgctgcattccagcctgggcaacggaggaggctctgtctcaaaaaaaaaaaaaaccaaaaagcaaaaaacacacacacacaaatgactacatatatgttccaagggaaacccaggccttgctctggtatggttcacgttctgctgggtagactgacaataggcaaagacacaggtcgggcacggtggctcacacctgtaatcccagcactttggggggccgaggcgggtggatcacctgaggtcaggagttcaagaccagcctggccaacatggagaaaccctgtctctactaaaagtacaaaaattagctgggcatggtggtgggtgccccaatccttgctactccagaggctgaggcaggagagtagcttgaacccaggggcagaggttccagtgagccgatatcacaccactgcactccagcctgggtgacagggcaagactccatctcaaacaacaaaaaaaagcctctcccctcacacagggggtctgtctctgtgcatgtgttcagcgtgggcctcccccactggctgccagctcggtgctcacggccgtgtccccagcacctgggacaggacagcacagccagctctgtgtggttcccggaaaacgtttgtggaagaagggaatggagccaagcccctctctgccacgcgtttgctgggtgaaggagagaaggctgtggccatgcgtcccgtggtggccggccctcttgaatccaaacagctttgaaaagtggcttgagcctccctgacacccctctgaccctgacgctgtcattccaggcaggtggacacgaacaccaaaaatgtctttgggcaaccgaggttgagggcatccctccgagacctccggtcaccacggaagaactacaaatccaccatcgaggatgacctgaagaaactcatcatcatggacaacctggggccagagcaggagagagacacgggagtacgtagggccctgtcccccgctcccgacccccagctcccaaggggatcccagatctgggcaggcaaggagaagggctgtgctccccacggtcacgccagctccttcccgtcgtgtccccagcctttggcatctgccagtcctgttgggggctatgggctcatggctgggagtgagggcagcgcattggtctgggatggaatcacaggataagcccaggcaggcactcgggaatctaccccataccgagaacctcgcacaactggagggcctcgtgccctcctcctccagcccaggatagaaacagccacatccacccaaaccacagggactgagagtggagcaggggctcccagaggaagttcagactcttgttactcagggacacgggtggaaagaacagtgggtgccagggaacctccacagcatccacttcccttcccctcccagccaggcctgccctactcgtcctcactgccaggcaggagctgttttgtggggactgaggtggaccccagcctccccagggttgggtcccaccagcctacagctgggggaagagagcacatcagcccagcgctacccactggggtcccagcactgactctggtgggtccagcttggctcacaccaccttccccaacccatcaggctttgatcgccagccttacccggagctggagggtggggttggggagtgggagtccctgggggaaaactggagcgctttgatcagaaaggaggcagaaggccaggggtggtggctcacacctgtaatcccagcactttgggtggctaaggtgagaggatcacttgagcccaggagttcaagaccatcctgggcaatgtaatgagaccctcatctctataaaaaaaatgtaaaaattagccaagggtggtggcatgcacctgtggtcccagctacctacctgggaagctgagataggaggatcgcttaagcccaggaggtcaaggttgtagtaagctgagatcgccccattatactccagattgggcgacagagtgagaccctgtctcaaaaaaggaaggaaggagggaggggggagggaggaagggagggagggaggaaggaaggaaatggggcagaaatggatgctgggtaggtaaggactcgccaccaatgtcctagaggggaagatgcctctgaggaccctggctatgagccagtctgtgacctcccccaacatcccacccacgccccacagcagtcaccgcagaagggcctgcagcggacgctgtcggacgagagcctgtgcagcgggcgccgggagcccagcttcgccagccccgctggcctagagccagggctgcccagcgacgtgctcttcaccagcacctgcgccttcccgtccagcacgctgcctgcacgccgccagcaccagcacccccacccgcccgtcggccccggtgccacccctgccgccggcagcggctttcccgagaagaaatgtgagcctgggccccctgggactggcgcggtagttaccccaaggttgggaggtggggatgcccgagcaggggctcacctggaggtcaaaggctagaggtcatcagtgtcggggccatctcagggaggaatggggttcacaggaacttcggggggcctgatggtggggcactgggtgtcacccaaggagcaagggatcattggccaagcatcagagggtcacctaggagtcagaagcacccaaggattggagtcacctgagaccagagaagaagtccaccctcagggtacaggcctagggaatggggctgcccagctgttgccctagcaccccccaaccctcccacccattccagctctaagcggtttgcttcctgagcattttatttgctttcctgactgctcccatgtttgccacacttgggggtggtgcatggtatgacttgttcactgcttaatcacccagaaaatatttactgagcactccccgtaaacaggtactgcgcacaccacccgcatcaaaagccacgagccagctggagttggccgtgccccagatgcaccctgtaaccccccttacccacctcctaacccccccacaactgaaagacagtacgtaagtttgcaccatgctcactgggtggcgaaacctggcctggaggggcgtgaggctgtttagggtccatagtccccctacttagtgctagcaatgaggagcttggggcagagcgctggcgtgccactgcgcgtggggtgcccctgacctttttgagtttgttacataatacacagcatctgcacacttactctctcaaatccaagcacatctcaaattcagaggcatgttctaccccaagggtctcagctgaggggctgtgcctgcctgtgccatctgtacagagcctcttgtgagctgtgggggatggggtggaggagactctgggaattttatgaagggcagtctgtctcccctattaaaactcccctgcaggccgggcgcggtggctcacgcctgtaatcccagcactttgggaggccgaggcgggtggatcacctgaggtcaggagttcgagaccagcctggccaatgtggtgaaaccccgtctctactaaaaatacaaaaattagctgggcatggtggcaggtgcctgtaatgccagctcctcaggaggctgaggcaggagaatcacttgaacctgggaggcagaggttgcagtgagctgagatcaagccactgcactccagcctgggtgacagagccagactccatctcaaaaaaaaaaaaacttcccctgcagctccgttgccttggcatttgcatctgcactccttgccctggtggtgtggggtgcccacctctgctcctccacctcacagagccttccttttgatcactcagcacaccagaccctccctgctcagggcatcctgcacggctgttctctccgcccgccatgctcttccctcagtcctcttctgggtcactcttgtccttcagggctggctccattcctgctttttcctggaaggctcctctaagccctggactgggtcccagcccccatctcaactccagagcttctgggccctcccctgcgctcccttcctgttcctgcagcgcctgctgtgggcggggctctgccctcggtgccaggatgtggccctgagcaagcagagcacacccctgccctcacagggctgccactttagtggaaatttccctgctccccaggcttccctccacgtctccttcctcggcctctcctccctgctgctctgtctctctgcccaaggcagggctggtcacgaagtagatgttcagtcactgcaaaggacggggacagcggccaccacggagaggtggtgacagagaacacaggcatagactccacaggccgatccgaattcctccagcttgctgtacctcattctttcagtcttggctcagatgccccctcctccaggaagccctcccttcccctaccaggctgagtcaggcaccaccacaggccccgtccccccccgcccccccgggtttctctcacccccctccgtccctactcaccgccttgtatccccatcaccatcctgagctgtcactagatgagaatgtgtctgtctccaccaccataccgggggccccccaaagacggggcctggggttttctctgtcactgctgtgaccccagctcaggtccctctgcatcacacagcacacacacacccttctctgtccatctgactcccccacacccctgagctggggagagtcccgtctggcctcagtgtggccagggaccctgggcctctccatttcttgtgtgcctgctccagagcccttcccgggccccatcccagatgaagagacatggtcatccctggcctgggcttcactaaccaagtgccctccacaccaaggagcctgtcacacggtgctcctgatgccctgctcagcaatggcagccactcccgtggctcccaccagctgagcagtgagacgccagcaggctagaggcacagaacaaggaggccaggggaagagcaaggaggcccagggtggagcatggaggtcaagggtggagcaaggaggccaagggcggagcatggaggtcaagggcagagcaaggaggtcaagggcagagcatggaggtcaagggcagagcaaggaggtcaagggcggagtgtggaggtcaagggcagagtgtggatgtcaaggcggagcaaggaggtcaagggaggagcatggaggtcaagggcagagcaaggaggtcaagggcggagcgtggaggtcaagggcagagcgtggaggtcaagggaggagcatggaggtcaagggcagagcatggaggtcaagggtggagcatggaggtcaagggaagagcaaggaggccaagggtggagcgtggaggtcaagagtggagcaaggaggtcaagggaggaacatagagtcaagggcagagcatggaggccgaggggggagccaggaggccgaggggggagcaaggaggctgagggacgagccaggaggccaaggactcgttcattcagccagcacttactgcacaccacatatcacagagctgaacggcctgagtttatgtcccacgtcttccactcacagatataacctctctgtgcctcagtttctttgactgtaaaatgtaaaaaatagtgcccacatccctgggttaaaagaatcaaacaagtgaatatgtggaaagcacgtagtgtatacctcatatgtagtcagcactgagtagtactagctggaagccatgtgagcccaggcaaggcagcgcctcgctcgggtctcagttttcctcttccatgagcagagatcatgtcaccccccgcctccgccagcctcacagtgaggctgtgagatgatctcccttggccctgcacagaggaggtgccgggaatgcagagcgggctgggcccacggtcaggctctgccgattcccagctaagggccctgaggtgtgtcttctggtctctctgtacctggctgtcctctgtccccttccctcaggggcttcaaggagtcacagagccccaggccagagcccgagcctggtgcctgggactctctcaatagccgcagcaggtgcgagtgcagtgctggcgccgttgcttctcacttccaactcctgagatgtcacaggcctctcctctgctcagcgtgtcatacctgaacctgcccccccacggcaaccccaccccgtgtaaacactgtccatacactggcgattccaatcacaggtgcagctgggactctcctcgtcgccagctcctgtggccagcctccgtcccaccatctccttggaatgtccagggccatctccaccgagcacctccagaaacagatttctgatcccccaccccagccttcccgatcagagccgcaatcctggcccttctctttgtttcacagccatatccaaccctcaggaaatcctattggctgcccctgaaaagtaggcccagaatctgcccctgtgtcctatcacggccccaccctggtcctgcccagcatcaccgtctccattgtgggttatggttacagctcctacctgctccctgtctccccccaaatccccccccaaacacacagtccgtcccccacatgcacccagagggagtcttccagggcactcagggtgagaacacagtcgtcactgggacccacaggccccacacggtccggccgtgttgcctctgttctcgcctcctgctgcttcctcccttgctcaccctctcccagccataggggccgcctctgtgttccttaaaccttccaggcacactcctgcctcagggatttagcactggctgttccgtctgcctggaatgttcctcccccaggtaatccgcctggtgcactccctcctccccttcagagttttgtccagatggcatctctgccaggcctggcccagcaccctgtttgaagtcaggcctctgtaggctccagcactcccagaccccttaccctgctggaggttttcctgggcatgtagcatctctgcataagcaatgggatgtcttcatgtatttgtgtctcccgcattgtcacactcaaccactgccatctccaccctccccatccagccaccatctcagcctcggagctctcgctggctgatgggcgggaccgccccctgcggcgcctggaccctgggctgatgcccctgcctgacacagctgctggcctcgagtggtccagcctggtgaacgcagccaaggcatacgaaggtaggcgccttccacccagtcccgccaggcccccaccccgtcctctgttctagagggattcatggagggcctcatggctttgcagggatacccactcaggttccagaatcagggagcagggttcaagtcctgccccgtcacttgcttaccatgcagccccgggcaagcgtcgtcatctctttgatgccagcgaaccacgttgaccaacaagcggaagtgaccatgcctgaggctgccatgacgattacacaaaacaccacgtgtaaaacacgtgaggccaagcacagtggttcacacctgtaatcccagcactctgagagtccaaggcaggaggatcgcttgagcccaggaggtggaggctgtgtggtgagctgtgatcacaccactgcactcactgcactccagcctgggcgacagtgcaagaccccgtgtctgggggaaaaaaaaaatctgtccctgaggacatttgggttttcagcgccagatctgggagccagggagcggaagacttttagtgccctgagggtcctgccaagaccttgcatcctgggttgggggttccccataccaggcctgcagggatcctcactccctgggttccctggagcagtggacagggtttgctctgccacccagggccctttatgtgctggaagtccgtgctgacggggccaggcagctgtggcatctcctctctcatgtgggtctccaagcatcctggggccaggacagccagttccaggacagtgggaagtgaggaaggcctcaggtctctccctggagacccagatgccatcagcggttgtagtgttgtttgcggaagacagagctgcccagacactgaccactcccccgcaaccgtgggccacaggaaagggctaggatagccagagccccttacccactcccagccgctccgtgtgcctggcatgcctgggagctgtgcgccccatgtgagaaagctgagggagcctggctggtggcactgatttctcccccaggctgtgcgtcacagtcgcctagggagctttttgcttccttataaaattaatagatgaaacacagaaggttacgggggagaggggggagtagcagaaagacctgggaggaagcacaccagcaccaccatggaggtgcctccccgggagccggaaaggggctggcagggagtgcaggtcagggtggtttcagcttgcctggaggtgtggtttttaatgaagatatatgtgggttttcccttgcaattcacataagtggaaaagactaaaggaattctcattaactttggtagatgtgttcatagcatagtaattttcttaaatatatatatatatattttatccactagagctacttagtgaagtttctacagatgaaatacaaagacatctagaatttgatttaaaatattccaggttgggtgcagtggttcgcacctgtaaccccaacactttgggaggtcaaggtaggaggatggcttgaggccaagaattcgagaccagcctgggcatcgtagcgacaccctgtcactacaaaaaaatttattttacttatttattttttagagtctcactctttcacccaggctggagttcagtggcgtgatcttggctcactgcagcctccacctctcaggttcaagcaattctcctgcctcagcctcctgagtagctgagattataggtactaattttaaaattagccaggcatggtatcacacacctgtagtccaagctcctcgggaggctgaagcaggaggatcgctggagcccagtagttctaggctggagtatgctgttctgatgcggtgtcttcactaaactcaacatcaatatggtgacctccagggagccagggaccaccaggtttcctaaggacaggtgtactggcccaggtcagaaatggagcaggtcagaactcccatgctgatcagtaatggactcgggtttgtgaatagccactgcactccagcgtgggcaacacagcaagaccctgtctcttaaaaaacagatgtcattatacattaaattcaagatagaaaaaaatagctataaagggtattattcagagaatcggagaacatttgcagatgactgtatattagataatatcatggccaggtgtggtggtgcatgcctataatccagcactttgggaggctgaggcaggcagatcacctgaggtcgggagttcgagaccagcctgaccaacatggaaaaatcccgtctctactaaaaatacaaaattagctgggcatggtggtgcatgcctataatcccagctacttgggaggctgaggcaggagaatcacttgaacccgggaggcggaagttgcagtgagccgagatggcgccatcgcactccagcctgggcaacaagagcgaaactccatttcaaaaaaaaaaaaaaagtaaatgggcaaagtattaacaatgagtggtgccagggaaagagtgctggggtttttactgtgctattcttgaggcacagaaatgaaagttggacccaaggagctgcttgcctctggggctggccctctgccctgccctgccctgcccctgatggtgccgccctcaacacacggcacacagggacgccttggtgtttttaacacctccgaggattccattgtctggctgttcatagctcactgaaccagccactgttggagggcactagggcggtggccagctgttgccattacaggaagaaaatctaagtcacgtttgaaaacgcaaacagctcaggtgcccccagtgccagtcacgtgtccaaggcgggacccaggaatcttcactttcactggcagccccgtgcgatttcttttctgtcttcaatatgcatgatgtgatctgtctcacttctctttttgcttttgaaatcttcccagcttcctccgaaggagagcgaattgtataacgaatccccgtggacctggcgccagcccgtccactttgtaacccttttttcctaccttttacttgtggaccaagtcaagtcacttatgttgagagcacgccaggttcggaatccggtcggttgctagctcgcactctcatctaactggcttcttcagcccttgcgttttgtatgaactggtcgttggatcgaaagcctcgatcggaatcaggatgggattttgattgtgttcttgttttgtgtgttcatttggttggttttttggcaagaatctatctaagtgccgatgcagtctgtcccaagtgtgataggaggcatcatggaggtttgcagggagaggcgtggtccgtctgttgcgggagaagccgggagccttgctgacccctctcctcctcctccctccctggcagtgcaaagagccgtctcactcttctctctgaacgacccggccctgagcccggacatcccgcctgcacacagtcctgtccacagccacctgagcctggagaggggacccccgacccccaggaccacccctaccatgaggtgaggtttccctgggaacacccgggttcataccagcggcaggcctgtgcagtggaagaggcttacccagagagaggcagccatgtgggtcacccccaccactctccgggcggaagctgatatagcagctactcccccctcctaacagacttggaagtcattacactgcacctgtctgtgcactggggatccacagtgaccaagacagactctgcccagtcccaacagatctcccagtccagcagagacgacacttgaatcaatacacacacagttgtttcgcttccaactttgaacactgctaagcaggccgggcgcggtggctcacgcctgtaaacccagcactttgggaggccaaggtgggtggatcacttgaggtcaggagttcaagaccagcctgaccaacatggtgaaaccccatctctactaaaaatacaaaaattagccgggcgtggtggtgcgtgcctgtaatcccagctactcgagaggctgtggcaggagaattgcttgaacccgggaggcgaagcttgcagtgagccaagatcgagccactgcactccagcctgggccacagagggagactccatctcaaaaaaaagaaaaaaagaaaggaaagctgctaggcagtgtctcccaatcccccagccctgtgcctctcgtcagccccgtcgctgccaatctcccgcctgtctgctccttcgtctcctcctctgcagattcctaaacctcacagacttctgcctcacgctcacccttcccagcctccctgccaggtgccgtgctgggctgtctgaggacctagtggcaactgaggccaggcctggccctcaggaagcttcacgggggaaggaagaggacggggacagatctctcacatttgtcatctcacgcgtggcttctcacattcagcgcagcatatttgactgcactcacttggcagaaaacaaaattaaaaagaggcagagagaatgtaaatggcacattctgcctgtacatggatttaaatagtgcatttcacactcgtctgcacacctcacggttcagggttctatatacaaccatccgtgcactgtacttcatgggcagtgggagcaatttttgagggtaattttgacttcttgcttttcacactctggcttcagaactcaacctccaccacgaacgtaggccccactgtaattacaagaaatcagcagttccagatggtgctgctgggctgaggggcaggagcagcatgggctgtgggaagcagcgggacctgtggcccctgggcggcgctcctggagtccatttgcccccatctccctctgcagctgcagatccccaagactcagcagcaaggttgtaggaaagggtgggcgaggcaggagggccagcccccgaccgccaccgcctctgtgcctgtgcacgcacggcatccagtggagcctccttcagccccaactccaagcaggaaagggctgcgcgttctctgcagcggccaggcaggcccagggctgggaggatctgcagaggggcagctactggccatgggcccctgattcaaatcctagcaccagcacgtggtagccatgcagcacctccaaaggccacagtgggcagaggagctctgtgagatgagccgggcagtctggggcttgttgcggggtggctctcagtgacggccacgtggtcagcatcactgccaggaccattgttggtcctgcccacaagggcaggtccttttgaccatctgtccattctcgtgcttcctgtgcctggacccgccaggtgctcagcaggtgtctgtagagtgggctctttgtatcctggaggtacgaagaaggggtcctccctgaagtcacatgcacggcccagcctcagggaaaacgcacacttaagggtgggcagccacccttcccctggcctggtgctcctaacaccccgtccacatccacagaggtgcccttggtgggtggagtgtgccgggtggagggctggcttcctgcttcccctcagagcttctcctcaggctttgctagaatgtcagggataagggggcctgtacccccaggctcctcagatgtgggccagaagccttccccaggggctttagggcctcaggctgaccttgtccctggtttttccagcgaggagccacccctggatctgacaggcaaggtgtaccagctggaggtgatgctgaaacagctgcacactgacctgcagaaggtaaggccgggggccacgccctctccatcccacttcccagacactgggcagggcagtcagcagggatcaggcacctgcccccgccatgcaggacccaccccacccccacacctcctgtgtttgagtgtagtcatgggtgaagagtaaacagtgataacaccccaggctaccaagcgctcagagaaactcatccattcttggggggagaataatcagcccaggcttttcggaaggcaattggataacatttatcaaaaaaacacaaaaaaactgtggctgggcgcggtggctcatacctgtaatcccagcactttgggaggccaaggtggtgggtcacctgaggtcaggagttcgagaccagcctggtcaacatggtgaaaccccatctctattaaaaagtacaataattagtcgggtgtggtggcgggtgcctgtaatcccaggtactcaggatgctgaggcaagagaatcgcttgaacccaggaaggtggaggttgcagtgagccgagatcatgccactgggctccagcctgggcaacagagcgagactccatctcaaaaaaaaagaaaaaaaaatgttgatccagtaattccacttgtgggaatttatccgtgacagcatgggtacaaagagattgtgaacaaggacgttcgttgccacactattggcaataaaaaattggagccagcgtggctgtcactcaacatgagaatggctgtgtaaattatagggtgtccatgcagcggaacagcttgcagccaattaaagtaataacaaatctatatatttactaacacgcaaaagaagtccagtaacttacataaaaaccaaagcgagctgcagcagtgttgtctagaatatcaccatacttatttatttattgtttaaccaccatggttgagagggccatctagaaggtgacagtcaatttgttctttggacttgtctccatggggcggaaggatgaggaggagactggctgggtacgttggctcacacctgtaatcccagcactttgggaggccgaggtgggtgaggtcaggagttcaagaccagcctggccaatatggtgaaaccccgtctctactaaaatacaaaattagccgggtgtggtggtgcacgcctgtaatcccagctacttgggaagctggggaggagaattgcttgaacccaggaggcggagattgcagtgagccgagatcatgcctctgcactccagcttgggcgacaagagcaaaacccagtctcaaaaaaaaaaaaaaaaaaatgaggaggagacttttatctattgtttctatacttctgggtaaaagccagaaaggtggcagagtatataatgcgtaagtcttcgagccgtggaatcaaaggggcccaggttctgacccccgccccactgcataatgctgcgcaacctgaaacaggtccctgcctttcgggggctacgtcctcctggaagaagggggtctgctcaggccaccctgcatccatgtcccagctccccacttgctgtgtgaggctggggtcctcttccaggaaactagggacagcgacagtccccaagtcctcgggtagtgtgaaggtgggatgcggtgacaatagtgatgtttgtcaagcgatgactccacatgtggttgcgttccgggagctctacatagatgagctccagacacccctcagcctcctggtagagttgcgggaaccaagtgacttgcccagggtccctcggttgtggagaggcagagtgggatgtgtgccccggcctggcctggctctagtggttggctccaaagcacagccgggccagggctcacaggcctcagggagccatcggctgttccaggagcggccaagcccacccgcctgatgccagcttcccaccctgtgcaggagaagcaggacaaggtggtgctccagtcagaggtggccagcctgcggcagaacaaccagcggctgcaggaggagtcgcaggccgccagcgagcagctgcgcaagtttgcggagatcttctgcagggagaagaaggagctctgaggtgggaggccgccgcccgccttcgctccttcccctcaggccgtggccctgctgcctctctccctccactcagctcccagctgccggtgtgaccaagatgacccatccagggccctccccatggacacggaaactccgatggcctcactagggctgtgagtcagggtcagcgcgcacagccctcatgccccagagggcgaagtggtctcaggcctccctccaagctgcccagctgtggtcccggtgagctgggctgtgcttacaccgctcccgggcctgccccgctgtccccatctagcctcttcctgggaccagcccttcgaagctgatggggacggagagaggagccagtctccagacgcctcggctccaggaggtcacacagcaggtttctgcaccacgcacaacaaagttgcggcttgtggggccgaggcccctgcatgaaaagtacagcgtgaaagcaaccctttcttccccacacccagagaggtgaggcccgcgtggacacagaccagggcgcctcggtccctagcacgtgagctccaaaaagcacgaacatgatcccctccctaaccccctcctcccaaaaagcagccaggagcactttcttagagtttaaattattttcttgggggcctgaggatagagagaggcaaggctagcctccagagccgatttatttgagagagaaactctatttggatctccaggacggtttatacgatctttttctatcagctcctcttccgccagaggccactgcacctgggctaggggtccacaggcccctccaccttccagctaaccaggccaggccggggcggtggagccaccacacagccgactctctcctcctcctcccggcacgacctggccctgaccagcagcctcggcctcttctgggttccaggaggggctcccgaagccctcaggacagggctggaggagaacagccttcatctcctcctctggtttttttttcctttgcaagtctcccagcccatctctccgagcagcggccaccagaccccctcaccatgctccccggggagcactgcaccccgcgaaccccactggacgctggttctctaaaggcaataaggggcggccatgccggtgtggtaccacgctgttcctccaggaaaccgtttctttttttccttctttaaaagcaaacagaaaaagatatatatatatatatatatatatttattttttcatgtagagttggcgccagaacaagcctgtatggccacagtctgtggattcatccccccaacctcaagctgaggaccaaggcgtgtcccctgtgggctgggggtcagtgggaggaccagagggatgaagtcagggcaggccggtgccctttttgggaggcaccaggcggggaggagttggcggagcaggtctggctgtgagccagcaccaggcaacccggcccttgtccagggacctctgctgccttctctctggggtcaggaacctcagaggagggggctctggggactgcataggacgcaggcactcggaggtgccggtgtggatgggtgggggtgagagaagagggttcttatcgcgtctcctgtgatcagcctctggccccctggaggaggaaacctcagcgctgcccctgcccccaccctcacccccaacaccaagagtgaggtgggcgtgccccaggcagcgtcctcagccctggccagctactgtgatgccatcttctcccccatccccttctctggggggcccacccgtcccccacccccaccccttagaccctcatcgggtccctttttttttttttttttcagttgtctcctcccatcttcagatcattcgaatcattttggggacttaatcatgtacatggacaagtgtaaattatgatttttggttttgttttctgttattttttaaggatttctgcaaaaacagatctatttaatttgaggttgatgttctatccaatggccgaagatagcagcaggttttttttttcatatgttgatttgtttcatttggattttttttttattattctttattgtcttttttttttccccatccctgtcttgagattttctggcatgtttctggaggtttcaaaggaaataaaggtttcatagaaatggcttgtgtgttcacttttggggcagctgcctggagttgctgaccagagggtgtggtccagcatcggcccctcctcctgctcctgtccccaaatcccccacaccatgaccaccacacacatgtcctaagaaccaggggcacctgccttgctaacttcttttccttggaatccaaaggacagaaatccaacactcagaatgtgaaatgtccttaagttcaaaagagtgagattctgcctcagaggtcatatactggaggcctgaaggccagccccagcccagagggttgtgttgggtcttagaaatagtggccaacttttaatctggacattcagccaggtgcagtggctcatgcctgtaatcccagcactttttgagaggctgaggcaggaggattgcttgagcctaggaattcaaaaccagcctggacaacatagcaagatcctacctctaaaaaaacctttttttttttttttttaactttttttcgaaacagaaactctgtcacccaggctggagtgcagtggtgcaatctcagctcactgcaacctccacgtcctaggttcaagtgattctcctgccttagcttcccgagtagctggaattacggggacccggctaatttttgtgtttttgtagagacgagatttcaccatgttggccaggctggtctcgaactcctgacctcaactgatctgcccacctcggcctcccaaagtgctgcattacaagtgtgagccaccgcgcccagcttaacttttttttttaatggatattgcacatgaggaaggccaggtttccagcttggttgatctgtcctttgctgcaagactcacaaggggcccctgcctcctttggccctggccacatggctgcatttgggacactcttcccccttctgtctgtagaggtgggagcagacccctgctgccacttgccaagtgaatgctttgggggtagaaagcagcccctgatcgccccagatctgcatctggcctggtgaacatttgcattttgggaaccgggatcaaactggtttctgaatcaggaaattcctcctgaaaatcccgaagtccagccccttgagggaagcctagcctcctgacggggctggccaggtggggtctttctgcctcccttacccatgtacctgtcgtggagtttcacatctctgagctaaaacccagtgcttctctgactcagaccctgccccctccaaaaaatgtctttttccaaaaggcgtggggctggcatccggaggagcaggaccagccattcccacatctcctaaaaattctggagttctagacaccctccctgtctccgccctcctcctcctcgaggccccgtcctcaacccgcactgccctccccccgccaccgggcgaagggggcgggaagcctgggaacaggctgttctcacatcctctcctggcgccggagccacgccagctgcttccagcaccccacaactcgcgcgcacgccagcccctggtcgcgcccaaactgtgctttgaggcccggcccttcccttcgtgtcccagtttccagcttcctctgcccgtctcggacatccctgtctctcctccccaatctttctgggtccctcatacctccggctctctctgcagattgttctgctgttcccctaaagtctgtctccttctctcccctgccgcccgcgtctctccccatctctgcctgttgtcctgggactttgcctgcccctgatcccaagtctctctctctccacccgcaatgtggctccctctcactcttccctctcctgatagatgttacctccttctctgcctcccctcttggaggacctctccctaaatctgctgctgctcttccccaatcaccgtcctccttctcctcctcccgtctctcccagcatgtcagctattttttattagttattccctctctgccgttaaacctccttctcacccctgctcccttcctctctcctggtccttcctcctgtctctctcccttctgcaccctcttgctcttttttctgattctctcaataactgtgtgactgtcctcgtctctttctctctcctgatctgtgtcctagttccctcactcctcactcccgccccccacccgtcgcccacatctcagtctctctcccagtgcccgtgtctagataccctcctgccctcccttagcgcctctctttccaccttatcgccaccgctgatttgccccacatccaggacacggagccccctggagatgtctgggtctgggatgacacctcctgacacccccgttccccaccccagcctcaggaggggccaacccaccgtcctcttcccagcccttcccttcccccggcccggctcccgcctccctcccggctgcgcccgctgcagctgcagcagcccgttgccagggcaaccacagctggctgggcgggagcccctccaccccatcccccttctcctcctttctggcaaagcagggcggagctgggacaaagccggggagaggcagggtgcaggcaggggaagaaggaggtggatggaggtaggggctggctggtcgcctcacccccaacaaggcccgtcgacccccggtcctccttcttggtgatgccccaaaccagacgggagaacgaggcagtcgtgggcagaggggtcaggcccagtttaatacacagaacaagttaattcacagcagaggcaggcaatagaggagactcggtgacaagtgagggggcactcctggattaggggacatccccccaaaacccaccacctcccccacctgcagtctcagtttcccttttttaaaacccgaacaacaaacacacacaaccacaagaaacaaccacgccccctcactcccccaaaatggccagcgaggggggcgggggccgccaggcctggcggggcgggaggagggagagaaaaggagtccgtggcggagtctgtgcttctcattccagcaggcgctgggcgggggcccacccggccccaccaccgccacccaccagccacggcaggcacggggcgggcacaggctggggcggtcggggaggggcaggaacagagttcaaaaccaaggttcacatcatgcagtatccaccgtgggcaccaggaggggcgggtggacaccacgcccaccgccctgggcacaagaggggaaggcgcccaccttgggtggggcgcgggacggctgcagctccagaaattggggttggggcgcccggcggggggccggcagaggcgggtgcccggtggacactctcagcagcgcccctccacccagccaggccttggaggactctttgtatatattaacttcttttcttttcttcttttttttttttttaactttttgtctttttctttagaaaaaggctctgtccatgcccctggctggcacccaccaccccccatgcccgcccagaggcggggtatggctttgaggggagaagcccctggtgtccatttgccaagggacagagagggagggagggagggagaggccctggccgggcccacccacccacagggcagacattccacttgcacagaggggagggggtggcccagccccctctcggcttccccctctccccctccccctgcgggatgttcagggtgggggagaattgaggagctcggagaggcaggtaggcgagcaccaccccagagtcgcggcgagccgagccggcctaggtgagggtgatgtaagcagaagccttttccttcaggtgccggagacagaggtgacagctccagctccctgcgggggcagccgaagctgaagtcaggcccgggtccgggagggctgccccagccccttcccaccccgaggacacacagtcttccacaaccaggagatggcgttcccacccacccgccccatgggatgcccacctctcctctcaccttccgggggctccgccatggggggactcaggcagtacatgtggtaaccccgatcgcagtcatcacaaaacagcagctggtcctggggggtgagacccgcccagctggcaccctgggggcacgggcaccagaaacgggggtggggggctggggcaggggctaggtcaagggggctgggggaggtgaggccttccgagaaaggttctgagaaggtctttgcagcaggaaatgtgtgcgcaacactgcttagccaaacacatatccctcaggacagtccctttgcgatttatagtgggggttttataaggctctgtggaaggcttattattattattattttatatttttagagacagggtcctaccctgttgcccaggctggaagtgcggtggtgcagtcacagctcactgcagcctcacactccttggggctcaagtgattctcctgcctcagtctcctgagctgggactacaggtgtgcgccaccatgcacgacttttttttttttttttttttttttgagacgggagtctcactatgttgcccaggctggtctggtctagaactcctgggctcaaaattcctcagcctcccaaagtgctgggattacacaggtgggccaccgctcccggtctgtgggaagtttaaatgacaccaagatgatctgatagcagctctgccagaaacggtcatggcttttgtttttgtttgttttttttttttttgagacggaatctcgctctgtcacccaggctggagtgtgcagtggcgccatctcggctcactgcaatctccacctcctgggctcaagccattctcctgcctcagcctcccgagtagctgggattacaggcacccagctaatttctgtatttttgtagagatggggtttcaccacgttggccaggctggtctcaaactcctgatctcaggtggtccacccacctcagcctcccagagtgctgggattccaggcgtgagccaccgcgctccgcctgtggaaggctttaaacaaccctaagatgatctgataccagctctgccagcagtggtcatggctttaaatctcagctctgccatttccctagctggctgaccctgggcaggtctctttccctctctgagctcagtttcttccctgtgaagtggaaacaagaccacctgcttcagagggtggttgggaggatccagagagatgaagaggaaaaagggccaggttcgatttatggacaccggcataatgataacacaggggactggtgttcaccagggaaggctcaggcacaggctttaggcttaaggggcagaggtggacgtgccaggcggggcgggcagcagggcacgcggggggcgggcggcactcacgtcgttctcggaggttccgcacaggctgcaggatttgcactcgatgcactgccagcggtaggtccgcacggctgccgtcatgttcaccgtgaattgtaaacacgaggggtgtcctgggggccaaggggcaggggtgcagttaggaggtcaccgtgcccctggtgggcactgaccggcaggggagccatagctcagcccctacccctggctcatgacgccaggatgagctgccgggatccacagcctgaccccacacctgcccagcaaccacgtggccggcagcagtcccccggccaccacagtctcctaccacaaccaccatggcaaccacactctgctccccagaacgccatggcaaccgcattccattacccacagtgctgtgccaaccactttctaccacccacaacaccgtggcaaccacattctgttaaccaccgtgctgagacagccactttccattacccacagcagaacggccaggggtcctgttaaccacagcaacgtggcaaccacactctcccagccacaatgccatggcaaccaccttccacaacggggtccccacacttcggtttcatgcaactgaagtccattccacttggtgccccagcaacaaaactgttactcacatcacagcactgtgcagcgccaggcttagtcattccacagccccgctgcagagacacccgcagccgctacctgcagccacgacccatggcgcccgccccctgcaaccacggccccggtgccatcacaactacattccattatactgagttgccatgacaaccatatttcactacccatgatgccacgacaaccacaattcatgacctactgtgctgaggcaaccagagtctatattgcccacaagcccaccatgggaaaccacattctgttaaccacaactctatggcgagctcatcctgctaccggtgcccaggtggtggtgtccgtcactcacaccacacagcccactacctgccatgccttggcccctgtctcttgctactccttttgtcttgttttggtttttgaaacaaggtctcactctgttgcccaggctgcagcatagtggcaccatcacagtgcactctgcagccttgacctcccaggctccagcgatcctcccacctcagcctcccgagtagctgggactaatggggtgcgaaactatgcccagccttttttttttttttttttttttgagacggagtcttgctctgatacccagggtggagtgcagtggtgcaatcttggctcatggcaacctctgagccccgggttcaagcgattctcctgcctcagcctccggagtagctggaactacaggcacgcaccaccacacccagctaaattttgtatttttatagagatggggtttcaccatgttggccaggatggtcttgatctcttgacctcatgatctgctcgccccagcctcccaaagtgctgggattacagatgtgagccacatcacccagcctggcctattttttttttaatagatgggctctcattatgttgccctggctagtcaaaaactcccagattcaaggggctgggtgctgcggtggctcacgcctgtaatcccagcactttgggaggtcaaggcaggcagatcacctgaggtcaggagtttgagaccagcctggccaacatggtgaaacccccgtctctactaaaaatattaaaaattagccaggcatggtggcgggtgcctgtaatcctagctactcgggaggctgaagcacaagaatcacttgaacccaggaggcggaggttgcagtgagccaagatcatgccaatgcactccagcctgggtgacagagggagactctgtctcaaaaaacaaaacaaaacaaaacaaaacaaaaaccttctgggctcaagcgagcctcccacttcagcctcccgagtagctggggctaatggggtgcaacaccatgcccagctaactttttttatatatagatgggatctcactatgttgcccaggctggtctcaaactcctgggctcaagggagcctccggcctcagcctcctgagttgctgggattacaggtgcacaacaacacacctggataatttttaaattttttgtagagatgggggtcttgctatgttgctcaggctggtctcaaattcctggcctcaagtgatcctcccacctctgcctcccaaagtgctgggattacaggcgtgagccaccacacctggcctctcactactcttgatgccatgctaagcacaggcagctacccacagtgccatgagagccacatcccattatccctaaagcctcactgatccgacccaattcccacaatcctcagcagttgcatcagcctcgctagctctggttatccacagtatcccctacatgctccgggtcccctcggtcctcaccgccttgcctccctccctccaggtctgcactcctgaatgtcctctgcacccggcccccagaaacctcaggtggggagcatcacctgatcgcccacagtccgcacaggagatgaggtcctcgggacaccccgtcttcttggagccccccaggcagaagtcacagtagccgttggggatgacagtgccgtcgggcgccttcttggctgcaagacagcagacaggcattggcacggggcaggcaagggcaccccgcaaaggtggctgcagactttaggagcagaaggaggcatccgtacctgtgtgtttcctttgtgcctcagggacccaggccaattctttgtaaaactctggggtaggggggacagagagagggactctcaccacaggcaaggctccaccctgcccccagcctcagccccaaggatggacctcttagtccaggcgtggggagctgggaagagtgagtagctaccccaagctgtggggagaggtgaaaacagttctcatcgggactcccaactctgcctttttaaatttttttttcaattaaaaataaaggcagggtcttggtatgttgcccaggctggtctccaactcctggcctccagtgatcctcccacctcggccactgccacaaagtggcgggattataagcgtgagccactgcacccagccaggattcccaactccttgagacaactgacatgtcctctttattgggtcaaaacttggtagacagcttgaggaagggctccctgcctcccttctcacatacatgtctcccagccagccactcccaactgcaccctcagtaatttgtatctaacaaattcagcgagtaccccagccaagatctggtatggaaacagacactcggaagaaaaactccgaacactgaggtgcgtgggtgtgtagtggccaggggtgaagacactcagcctctgcctctgagagataggtgggaagacagtgtctccctactgcctctcccaaaccctcctcccctcccccatccttcagctgtcagaactggcatgggattggcaagggcggaagccaagggctcccaggccacagaccctgccccttgaccaaagcttagcagagaaaggagaaagggaaggcagggcgggaggggagccatctatcaccccccctccccaagctctaattgaaacaataaatcagacccagaaatattacgcccggccaggagcgaaggagcgatggttggttgccatggcaaccccggagccagcatccccatggtcggtggggggagggaacggctgagctggagattttccagaaatgtctaatgcccccccacccccacccccagctgggctcctcttccccactcccagggcccctggccacccccacctggcctgccagctcacgtttatggttgtttttccggtggaagggcagggcgtggcgttcggcgttctcctccccctcctcctcggccaggtgggtgtgggtgtagtggtagctgagccccggccggttcttataccgtttcccacagactggggagcgagcgagccaggagggcctgtcagcccctccgggcccctgccgcctccaccctggcctccaggatcacacctcccccctcagccagagacctgagcagcctcccaacccgggtctggaacgggagggagagggccacgaggtggggagtctctgggcacccctctctctgcctttccccctcttcagaaggactcactatcacagacatacggcttgtctcggtcctccagggaagcggtgtcctggcgtttccggagacccccgatgccatatgcctgtggggagagtcaggagtgaggggccaagaaagtgagaaaacaggccaggcgtggtggctcacacctgtaatcccagcactttgggaggccgaggcaggcggatcacgaggtcaagagatcgagaccaccttggccaacatggtgaagccccgtctctactaaaaatagaaaaattagctgggcatggtggcgcgtgcctgtagtcccagctactcgggaggctgaggcaggagaatcgcttgaacccgggaggcggaggttgcagtgagcagatattgcgccactgcactctagcctgtgacagagcgagactccgtctcaaaaaaaagaaaaaaaagaaaaaagaaagtgagaaaacagtgtcttttgcaaattcaaattgcagctgtacaaatgtcctagctgtggggccttgaacctctccaaggttcagcttcttcctctgtggcatggggatgaaggtagctctaacccactgcataatctctgctttgcaaatggcttaatacagatgagcctcagtttcctcatctgtaaaatgggtataaaatcccccacccctgcaggccgctctggggattcaatgaggtcagactgaggtcagactgtggcaggggcggaccactgcacctgctccatgaatgagacctgtcattgaggggagcggggaagaggagaagcttggggtgatacctttcctttggccctgttcttcctcctgggaatgtcatcctccaagtcttccacctcgaggtcatgcggaaactccagcaactgctgtttctgggcaatagagaaaggagacgggtcaagaaagtgggggccactgacctgcttttgaggggctctgggcaaaggtggagattgggggtgagagtataagtcaggagttcttccaaatagagatgaagtctgggaggatggtgactgggatgcccaacagccagaagaaaccgggggggtttcagagcaggaacgtgagggcccgggctggtggcaggcaggggtgagacgaagccatgcagcgggggtcccccagaggtgggcccacctgacagtccataatggtctcctcctccttcagctcaatcttcttctcccccgtctctgcacacagtagagcctcgaggaccggcccttccgggaggccaccctccttcttcaggggtgcttcacagtctggggacagggccatgggggggtcagatggggaagttgaccccggaggactcctcaaactatgcaggtggggggaccatgctctttgcaggagggaagaggctgcagaggcaaggatttaaccacatgccctaggagggaggcccagactctggggagacccagtcacgccctcagatgccctgggatgcacagcaggagacacggtcagaactttggatacaccagaaagcctcagaaaaagacacagttaggccatcaggcacacccagacctactcagggaagacacagcgactctcaaacatacccagacaaatatggacagatccagacactcgcagaggagacacagggacacccgcaggggacatccagacagatcgtctgagacagatgcgggaaggaagaggcccagccatgctgtcttttttcttttttttttgagacagggtctcgctctgtcacccaggttggagtgcagtggcgcaatctcagctcactgcgactcccaggctcaagtgatcctcccacctcagcctcctgagtagctgggactacaggcagagtagctggcatgctaccacactgggctaatttttgtatttttggtagagatggggtttcatcgtgttaatcaggctggtctcaaactcctgagttcaagcgatcctctgcctcggccttccaaagtgctggaattacaggcataagccacactctcagatacagcctagagactcaaagaggtatagccagatccttggagacacccagacacagggaggagacatagctggacccatgggtacactcagaaatgctcagagacaattagctggccaggcgcgttggctcacacctgtaatcccaacactttaggaggctgaggcgggtggatcacttgaggtcaggagtttgagaccagcctggccaacatggtaaaacctcatctctacttaaaaaaaaaaaaatacaaaaattagccgggtgtaggggcacatgcctgtaatcccagctactcaggaggttgaggcagagaatcacttgaacccgggatgcggaggttgcagtgagccgagatcgtgccactgcactccaaactgggtgaaaaaaaaaaagaaaggaagaaggaaggaaggagggaaagaaaagaaaaagaaagagagagaaagaaagaaagaaggaaggaaagaaagaaagaaaggaaggaaggaaagaaaagaaaaagagagagagagaaagaaagagaaagaaagaaagaaagagaaagaaagaaagaggccgggtgcggtggctcacgcctgtaatcccagcactttgggaggccgaggcgggcagatcatgaggtcaggagatcgagaccatcctggctaacacggtgaaaccccgtctctactaaaaatacaaaaaattagctgggcgtagtggcaggcgcctgtagtcccagctactcgggaggctgaggcaggagaatggcgtgaacccaggaggcggagcttgcagtgagatcgcgccactgcactccagcctgggcgacagagcaagactccgtctcaaaaaaaaaaaagaaaaagaaaaagaaaaaagaaaaaaagaaagaaacaattagccctccagatacacctagaccctggggaagacacagccagatgagatgcttggacacatagcggggagataccgacatactcagggagaatcactcagctagatacacacaaacacacacaggagacagacaggaagagacacagccaggtgggcactgccacgctcctgggtacacacagaccctcggactcaggaagagaaactgaccccgaggatcccgatattcctaaacacattcaagggtaagtccagatcctctgatggactggcacacacgtgcagaaatacacctgatacgccagacaccatcaggaagattctcccagacactccgaggcacccacacacccacagaaagagacggccgcaccgcctaacacacccagacacactcgggaggagccggacaccctgacagaccagacatacacaagacacaagccttctaagacacttggagacacctgggaagatacacctaagagaggaaagagctccaaccagacactgagacatccagacgcccttggggagatacagaggcagacaccctcaggcacccacagaaaaaaatacaggcagatggccgggcatggtgactcaagcctgtaatcccagcactctgggaggccaaggcaggtggatcacctgaggtcaggagttcgagaccagcctggccaacatggtgaaaccctgtctctactaaaaatacaaaaaaattagccgggcatgtcagtgtgcatctgtaatcccagctactcaggaggctgagacaggagaatcgcttgaacccactaggcggaggttgcagtgagctgagattgcgccactgtactccagcctgggtgacagagccagactccatctcaaaaaaaaaaaaaatacaggcagactgatccatcccagttcccaggggaagggacacagtcagcaactccatacacccacacacacctaacagatatcactatgccctccaataccactgggacccttggtggggcatggtggttcacgcctataatccctgcactttggagggctgagacaggaggatcccttgagctcaggagttcaagaccagactgggcaacatagtaacaccctgcctctatttaaaaaacaacaggccaggcgcggtggctcacacctgtaatcccagcactttgggaggccgaggtggccagatcacctgaggtcaggagttccagaccagcctgaccaacatggtgaaaccccgtttctactaaaaatacaaaatcagccgggcatggtggcgcatgcctgtaatcccagctactcggaaggctgaggcagaatcgcttgaacctgctaggcggaagttgcgggttcaaggttcaactccccgctaggtggaggttgggggatcacgccattgcacgccagcctgggtgaaactctgtctcaaaaataaataaataaataaataaataaataaataacaacaactgggcacctgggcccatgtaggaggagatgcagtcgccactcagtgactcagagaaactgtggaatctctgggaaacacccgggacgcacatgggcagacagacacacagccagccaggcagacacttgctagaaggcgataaaggtgatggacgagtgctaggacacacagcaggcgctgggacaccgatgggggccccagcggctgcacccaccgatcttgtactcgcagggcctgagtctggggtcctccaggatgttgagtctccgtttcttcctccaacagcgggcggggtacgtgtaaatctgtcccggggccaaacctggagagagaggggggtgagagggcggcggcggtggggcggcctggccccgccccgccctgcgccagccctcccggcggtacccggcccgcggtgggtcttctccatccagatgtagcagttgttctgggccacgccggtctgcgagtcgaggaagggcagtcgcaggctgcgctcggcgcacaggcgcgcgttgtaactgcggcagtgctcgatggcctcgcggtagaagtcctcgcctaggctagaggggcggcgaacgggcgggcggctgtcagcaagggcaggcgcacagggtcgcccagcaccccttccccggctgccgggccgcccaggctcgggaggggtgggccgacccctccagcctcacctctcccctcctcccactccgggacccaggctgggggaaggggacagggcccaggggcccccaaactgggactcaaacaggcccccagctcatgagtagaaacacgatacagaaacaaacaaaaacacaccgggacgtatccctacctgaacacatgcagacacacaacacaaatcacacacagtcacacgggattcacacacaaagagagacaaatcccaatactcacaaaggagaaacagacaaacctcacacacgtgcacacataaatatctactgaaaaagacaaatatcccaagttccatagtgtggagacaaatcacacaaataaccatgcacaaagacacatcacatatccacagacacacaccagaaacacatcacccacacaaagacacacaacatggaaacatcacaccacacacacatacaccccctcatgcatccaaagacacaagcatgtcaaaagacaggaactacagaaaccacttgcgcccctaggcacttacccatgtatccaaagacacaacacaaaccacacacacaatatccagacacacaacacaaagaaatcacacagattcacacaggtacacacacacatttacaaagatgcacgatgcgcaaccagtatctaaaatatcacacatccacacagacacacacacatataaaacacagaaacagccaaatccacccatagtcacacaaaaatttacacacaaatacacgcagccctacatacccaaaaacacagaacacaagacaaatgacatatagttccaaaggacacggacacacactgggagacccaaatatccaaagatatctagtgcagaataaaaggaaacagacacatgtccacacacctatcccccaaaaattcttaaaaaaaccagaacacaaataagtgatacacacacacactccacatcccaagacaaaggtagtgtggacttcactccagttgccaaggcccccgcacccccgggtcatttcagtctctcccagacccgagggttgcagggaagggatgatgtctcccttccccaaaaagaatctggaggccccccacgccctccaccccgccagggagcggtgcatccgacaccattcttgtcagagacccacagtcacacactctcgcacccccgcgcagccccgcactcggtgacagccccccagacaccccttcggccccacccccggtcgccacacacacacaggcccgcgtagacccgcccgcgcttcctctccgcctcccgccggcccgcaccacctcagggggccagggatgacagtggccatcttgctccccgggtcctgcccccagcaggtccccgccgggtcggtcctcccagcggtcgggcgggcgctgaggccgcccatccattcattcccggggggcgggagcacgagggccacggccaatcgcggcgacggggcgggcccgcccgggccatgctgggagtggtagtcccaggccagggggcccccgggaccccgcggggacgggacggcgcggaggaggggcccggggcacgcaccgtcactcacccgccctcactcgtccacatatcctgctctcgcgtgcacacaaccacatgcacacctggactcgcacacgcccacgcatggcagtttacacacacattcacgcggatactcacagcctcccacacactcctactcacacaccttcgcacggactcacacagccacacgcacacacactgcaatactaagagacgcagagacacctcccaggtgcccacacagacttctcaccaacatgcttccagcagacaccccctcaccgccccccacccaagtccctcctggctccagagaccccacccggggctgtctctcccagcagccacgctcacggtcaccccgccctgctcaacgccttctgcaggcctgacagcagcagtgcaggttagaaacagtagtcacacctccagggttcaaatcctagctctgccacttggtggccatgtgaccttggcaaatgacttaacctttctgggcctcagtttcctcatctgtaaaaagaggatgatgcctcactggagtgttgtgaggattaaatgagtaaatataggtaaagcattttaagaggtgactggcaggccaggcgcagtggctcacacctgtaatcccggcactttgggaggcccaggcaggtggatcacctgaggatgggagttcgagaccagcctggccaacatggtagtagtctctactaaaaatacaaaattagccgggcatggtggcgcatgcttatactcccccactcaggaggctgaggcaggagaatcacttgaactcaggaggtggaggttgcagtgagctgagatcgtgccattgcactccagcctgggcaacaagagtgagactccctctcaaaaataaataaataaataataagaaagaaagaataatgcggccaggtgcgatggctccagtctgcaatcccagtacttcgggaggcctagatgagagcactgcttgagcccaggagtttgagaccaacctgggcaacatatccagacccctgtgtctacaaaaaaaaattaaaattagctgggcatgatggcgcagcagtgtagtcccagctacttgcaaggctaaagtgggaggatagcttgaacctgggaggctgaggctgcagtgagctgtggtctcaccactgcactccagcctgggtggcagagcgagactctgtctctaaaagcaaacaaacaaacaaacaaacaaacaaaaaactaagtaagcagggcgccgtgactcatgcctgtaatcccagcaatctgggaggctgagatgagaggaccgcttgagctcaggagaacagcctgggcaacatagcgagacctggtctctactaaaaaaaaaataaatagctgggcatggtggcacatgcctatggtcccagctactcaggaggctgagtcaggaggattggttgaacccaggagatcgaagctgcagtgagctatgatcacaccactacactccagcctggacaactgagcaagaccctgtctccaaaaaaaaaaaaaaaaatagatgctcagtagatatttgttgaatgagtaaatgcacccatcatgtgctgggcacagttcaccccgggatgcttttattatctgcattttccaggtgaggaatctgaggcacaggaaggtaacctcacatgcccgcatgccctggcggctctttgaaggtaagactgaaggaaggaggcaggcacccctgacggccctccccaagtagtcctgacctccttctctctcccactgtcacccacactgactccacccgaagagatccccagggagtgagcagacccactgagtcacaaactgacccagtctctctgcaacaccaccaccccgtcccccctcccgtctcacccctcctccccctttccccttcccaccccttctccccctttccccttcccctcttccacccggacccctgtagagccagcattcaaatttgggcggctgctgtaattaacacgcccacaaacgccctcatccaccagggggcgccccagccgacagaagtggcccgctagccttcaccatttttgtcacttgaaatccccccaagagagagatccagtcaaggcctcctacactcacggtcacttctacacacacacacacacacacacacacacacacacactcctctagtcttagaccctttccacaaactcgcccatctaagccaggtaaggtcttggccggcccctctcctggaacaggaggtaggtctctgattcacatatggcctggagtggtgacaaggggattaagtgaggggcactgacacccctacgatcactctggcctccagggccctatagtggccacctcacaccttacccacggtgagctgtgaccccaccttcctctctcacctcccattagctcacaggtcccgtaacacaccctcttacacttgattcccacaccgctagcctcagacacgcagactcactcctgccccaccccaaactctcatgtcgatttgattaagagaagcccgagtgtagacactgagtgcagaccttcctaacagtcctcctctaccagcagaatttctatttttctttcttttcttttcttcttttatttctcttccttccttccttccttccttccttccttccttccttcctttctttctttctttcttttcttctctttctttcctctttctctttttctcttttttttttttggacagcgtctcactcgatggcccaggctggagtgccatggcatgaacacagctcgctgcagcctccacctcccaggctcaagcgatcctcccacctcaaacccccaagtagctgggactacaggcctgtgccaccgcacccggctaatttttgtatttttgtaaaaacagggtgtccctgtgttggccaggctagtctcaaactcctaagctcaagtgatctgcccaccctgccctcccaaagtgctgagattacaggcataagccaccatgcccggcccaccagcaggatatctacccacagacgcaggctgacacttgcagcgggctctcctttctttccttctgccctaaccacctgcacacaccactcccacatactctcctacacacttgaactcccagtcctctccctggcccaaacaatcctcctgccccatcccccaatgccctgtgtgggagctggcccacagtagaaatcaatttcataaatcaatattgatactactaataataatcactacatttggtcagtgtcagtctctgtgctaactgctttacaaagatggccttagccccacgacagtcccatcgggtggtaagggctgttagaagcccccatacacagatggcaaaactgaggctcacggcagggaacattcgtggctcaagctggttttggaactcaggcagtcggaacttccgagggcggcaccctgcagctccttctccccaggggatttgactcacattctttcaggagccagggagtccccaccttcacccccacagagaccttttggaagggaagggcacagaggggtagggccctcccagtccaggcttactgtagctgggcccctgctcacggctgtagcacacctcctcccaggggtctgggccagggtcagggtgaggggccccatcgcctgtagatccaccaacctgcacaagagccccgttcccagccattttgcggatgtcccctcacaggagagacagctgtctgtgtgtgccacttagggtgagagggcagcagaggggtgtcaccatcatacaccacctcacacggacccgagccccacacacccgctcccggcaccctgctcacggcgaagccacacgtgtaggcgcttgcctctaagtccctgccccccttcctctcccaactcccaccctccacctcccacccccattcccgccagaaaccagaagcaactggcggcctctggtccagccagcaggcgcatcccttctcgtgggtggggtaggggggcgctccctctctccctctctccccccaccccccacccccgcccccagccctcgatgttcaaggtcaaggcagccagcgcacggggttgggggaagggtgggggaggtcgccccggcccctttgtgcgacgccgcgggcgctcgccctccgcctcctccaccaggcccgggaggagggggaggggagcgcctcgctcgcctgcggggagggagggcgggagcggccgagtgcctgtcacttggagcccgctgtcaccgcctgggaacggggggtggggagcgctgggacgtggagtccgggatcccgaagaggaagcaagagcgagatggagagggggaaggggaggtgtggagagcgcgagggatggcaaggagaggagagggtcaggaggggccaggctcggacccaggcttccggattcccagccaccgggcccgggaagaggcgaacgctcggaggaccgcggccagggagaaagggagggaatccccggagaccgagggcgctcccggcaccccctcctgggcagccggtccccaaagggatcagagatgctcccgtttgatgtgtatgcgcggggagagggagggatgccgcggtccagactgacggcgggttcggggcttccagttcccgggatcccgggaggaaaaaggggaggcagcggggatggaactggggacccccgacgtctcagctcccaccctgcggccgcgagggccggggtcctcagagaaagaaggggaaagagagaaaggcgctttgatgagcggagagcgggtgatggaaaccctggagaccgaggtccggacttaggtgttcgagctttcagccccggccggggcaggcccggcacctccggagaccctgagggagagatggaggagagggaaacccctacccccactctgggtggggaaacggcctccgccacccccagcccgcgccgcattccttcactgacagcgacaaagaagaggcgcccccgcgaccctggaggggctcccgcccccaaccccagggggcgacagggggtggggacccccggggcaagggttcgcgctgggggcccccattcaactacggtccgcgcgctgcgtccccctcctcagccccagggcgggcgggggaagggctcctggtgggggggtctggacagggggcggggacggcagggacactcacgacttgagcgggttctgaatggcggtggccatggcccgctcggctgggccgcctccggcccggggcgccgctgccgccgcgcgcgggcccagcccggcctgcgccgcccgctctgccgcccagcgcgctacgatttcattcattcttggggctgcggcgcgagcggagcggggcgggccgggggcggggctcagccaatccccgcgcctcccagcgcacgacgggacgtggagtctaggggcgcgcggcggcgcccgagggcgcccctgcccggactacacgtcccagggggcgtcaggaggaccgcgctcccattggctgctggggatacagggaggggcggggctccccccagagcatctttcctccctccctgggagtgctcggtctccaactcgggatctccaccctccaggcaccgcgggcgcggaagcaggtggtccctagcttctagatgtccccagggtatgtggatgaccctagggtctgtcgtgtattcttgtctaggcctatttgggtgtctcttctatgtcggacagcctgtgaacaagcacaggggttaatcagtgcctttgttcatttactgagtgcctgctgtgttccaggaactcttctaggcactggggatacagcaatgaccaaaacaaagttgccgctctcaaggagctgacattctagtggagaaagacagataataagaaaataaatagataaaatcatttcagacagtgaaaggtgctataaagaaaagaaaatggggccagtcgtggttgctcatcactttgggaggcctgtaatcccatcactttgggaggccaaggcaggtggatcatctgagcttaggagttcaagaccaatatgggcaacatggcgaaaccccgtctctacccaaaatacaaaaaattagctgggtgtggtggtgcatgcctgtagtcccagctactcaggaagctgaggtgggaggatcacttgagcctgggaggcagagattgcagtgagccgagattgtaccactgcattccagcctgggtgacagagcgagaccctgtctcaaaaaaaaaaaaaaaaaaaagagagagagagagagagaaagaaagaaaaagaaaaagagaagagtccaggcacacacctataatcccagcactttgggagcctgaggcaggaggattgcttgagccccatagcacaagaccagcctgggcaacatagtgagatcccatctctgcaaaaagtttaaaaattatctgggtgtggtgatgcatgtctggagtctcagctactcaggaggctgaggcaagaagatcacttgagcctgaaagttggaggcagtagtgagctccagcctggacaacagagagagtctccgtcaaaagcaagaaagcaagcaagcaagcaagagaaagaaagaaaaagaaagaaaagaagaaaataaaatagattcagcagaacacagattccagaaagaaaaaagaagcaaataaaagataattttaaaaaaagaaaacagattgatttgaaggagtgaagaagtggcttctctgaagagatgacatttgagctaaggtctagaagttgccagcatgcactaagaagcatgtctaggcacaggatcaccaagtgcaaatgccctgggctgggaacaagtgtggcatgttcaaagatcaggaagcaattgagtgtgactggagcagagtgagcagggggagacagcctggggagagagcaaggacccggctcatgtagtaccttgtaggtcattataaagaaaatggattttgttctaagtgcaatcaatcatcctgaactctccttctcctcttctttttcgcacacacactccaagcccatcggcaaattctgttgtctctacattcaaaacatatccagattccacccactctctgcacttcatggcctgcaccccagtcctgtccatcattgtctgctgcctggactatggtagcagcttcatcactgggctcctgcccctcaagtctgctctccccacacagccagagcaggctatctgaagcatatctctgtgctgagcacagtggctcatgcctgtaatcccaacactttgggaggccaaggtgggtggatcacttgaggtcaggagtttgagaccagcctggccaacatggtgaaaccccatctctactaaaaatacaaaaattagccagctgtggtggtgcatgcctgtaatcccagctactcggaaggctgaggcaggagaatcgcttgaacctgagagacagaggttgcagcgagccaagatcgcactgctgcactccagcctgggcaaaagagagattccatctcaactaataataataatgattaattaattaagcatatatctgcatccaaccactctctggctcaaacctccagcggcttctttcataatttgaataaaatgcaaagccctcgctacgccctcctccatccctcctcaaccctcatcacatttctggcctctttcacctccttccttcccttggctaacttcactccagccccactagcttcctccctatttctggaacattccaatcccactccagccacaggacctttgcacctctgcctagagtgctcctcccacagacacctgcctcactccatcccgcacttcattcaggtctccggttaaatgccacctcctcagacacaaccctagctaaaattgcagcccctagcctcctgcctcagcctcccaaagtgctggggttacaggcgcgagccacaacacccagccaaaattatgaataaataaatgtattggccaggtgcagtttgctcatgtttgtaatcctagcactttgggagcccgaggcgggtggatcacctgaagttaagagttagggaccaactggccaacacagtgaaaccccagctctactaaaaatacaaaaataagccaggtgtggtggcacgtgcctgtaatcccagccactcaagaggctgaggcaagagaatcacttgaacccagggggcggaggttgcagtgagtcgagattgtgccacttcactccagcctgggcaaaagagcaaaaaactccatctcaaaataaaataataaaataaaataaatgtatcaattagtcatgctccatgcctctccccagtgtccaaaagcatgcacccagcatgaagagaatcaggtgggatccaggctctgccctaccccatatggacacttggacaacctgaagtgaggggcaaatttggggccttttttaaggaaaagtgcccagcacagcatctggacctaaggcttcaaggcagagagaagggatacattaaaaggcacacttggccgggcgcggtgcctcatgcctataatcccaacactttgggaggccgaggagggtggatcacctgaggtcaggagtttgagaccagcctggccaacatggtgtaaccctgtctctactaaaaatacaaaaattagccgggcgtggtggcgggcgcctgtagtcccagctattagggaggctgaggcaggagaatcacttgaactcaggaagtggaggctgcagtgagctgagatggcaccactgcactctagtctgagcaacagagtgagactccatcccaaaataaataaataaataaatgtcacatccactcatttctagagaacgatgatggtctccatccctctgtggatgtgctggggacacagcagcaaataagatggccccagactttgccttaagcttggagtccagaagagtaacagactcatcaccagacagtgatgtccagaggggtccaggtggggttaggggacacaggcagaggggtcggggctgggacaagggggacacaggcagaggggtctgggccaggattggggagcacaggcagaggggttgggtttgggacaagggggactcaggcagaggggcccaggtgggatggggagcacagacagaggggtccaggtgggatggggagcacaggcggaggggtcggagctgggacaagggggacacaggcagaggggtccgggccgggattggggggcacaggcagaggggtcggggctgggacaaggaggacacaggcagaggggtccgggcagggattggggggcacaggcagaggggtcggggctggagcgggggagacacagggcactgtgggagcccagaggcggctgtctcctggcctagcctgacagtcagggatgccttcctggaggagaggacacccggcctgcatgtgaatccttttgagtcctgaccccctgatctacccagacacagggcaaggttcctgctctgacctcttggggccttaatgcctgatcttcttaatgcccatcactcaagctttgaggaacaaaccctaaaagtctcaacctgtggtcacttctcctaaccctggaacccaagggtttgcccaccagagggcgctgtggccccagtctttgtccagcagaggctgcttcggaagcctcagatccgggagacatcctgcaggccatggggctgcccgcagagacactgggcccccaaccctgagcctcagaccctgcccaggacctggtcaccagggtatctccctctccttctctctctcacacacacacgcctctaatccaaggttccggtggacctggaatcacagaaaactctgccccatacccactgggtccagctttggcctctgaaggaaatgcaactgctaacagccacttctcccctctcctgcccgctacaattcagaggaagccttccctaagtggcccttgggatgttcagatgtacctttcagaagtttcctgcccaggcccagtgcggtggctcacgcctgtaaccccagcactttgggaggcggaggcaggcggatcacctgaggtcaggagttcaagaccagcctggccaacatggtgaaaccctgtctctactaaaagtacaaaaaataactggctgagcatggtggcaggtgcctgtaatcccagctactcaggaggttgaggtaggataatagcttgaacccaggaggcagacactgcagtgggctgagatcatgccacctgcactccagcctgggcaacaagagtgagaccctgtatcaaaaaaaaaaaaaaaaaaaaagtttcctgcccagatggggatgctgaggcgcagaagaggtggggctggggggccatgcagtatcagggcagcaacagtaataatcgtaacagcaaataaagactcattggttcagctcctcctgagtcaggacctgtactgagctttaacaagctacacacatcactgaatcatacagaccacacttgggaagcaggcacccaaatgtcagcaatgagctgagacgggaagccctcaaccttcatggcagggagaagtaggattcgaacccagatctggttgggtgtggtggctcaagcctgtaatcccagcatcccagcactttgggaggccaaggtgggaggattttttttttttttttttttttttttttttgcttgattttgaaacagagtctcactccgtcgcccaggctggagttcaggggcgccatctcagctcacttcaacctcctcctccttggttcaagtgattctcctgcctcagcctcccaagtagctgggactacaggcatgcgtcaccacatctgactaatttttgtatttttagtagagatggggtctcaccatgttgggcaagctgatctcgaactcctgacctcaaatgatccacccacctcggcctgccaaagggctgggattacaggcatgagccaccgtgcctggccaggaggattgtttgagcccaggagtttgagaccagacaaggcaacatagtgagaccccatctctacaaaagattaaaaataaattagccaagtgtggtgaggggcacttatactcccagctattcaggaggctgaggcaggaggatcactggagcccagcctgggcttctgaaggagacatgactgctaaggtcgaggcagtagtgagctatgattgtgccactgcactccagcctggggtgctgagggagacttgacacagacaggagagtgagactctggctcaaaaaaaaaataagaaagaaagatatatcaggctgggagcggtggctcaggctgggcacagtggctcaagcctgaaatcccagcactttgggaggccgaggcaggcggaccacaaggtcaaaagattgagaccatcctggccaacatggtgaaaccccgtgtctactaaaaatacaaaaattagctgggcgtggtggcacgcacctatagtcccagctactcgggaggctgaggcaggagaatcgcttgaacccaggaggcagaggttgcagtgagccgacattgcgccaaggcactccagcctggcgacaaagcgagactccgtctcaaaaaaaaaaaaaaaaaaaaagggaagggaaggggaggggagggaagggaagggaagggaagggaaggtctctctgattattggtggggatgcagactgtggaggcaaaggggagagcagagaccagggaagtggtgccaagatgggtcagaggggagggggagcaacagtgtgggtatgagaaagggatgggaagtaagagaatgtggctgttatatgaccaccaaagtggtggcctaaaacaacagaaatgggcgggcaagggtcatgcctggaatcccagcactttgggaggccgaggagggcagatcacttgaggtcaggagatcaagaccagcctggccaacatggtgaaaccccgtctctactaaaaatacaaaaattatctgggtgtggtaatgcatgtctgcagtctcagctactcaggaggctgaggcaagaagatcacttgagcctgaaagttggaagcagtagtgagctatgatcacaccactgcactgcagcctggacaacagagagagtctctctctaaaaaaaaaaaaaaaaagaaagaaaagaaaaagaagaaataggttcagcagaacacagattctagaaagaaaaaagaagcaaataaaaaataattttaaaaaataaaacagattgatttgaaggagtgaagaagtgtggtggcggatgcctgtaatcccagctactcgggaggctgaggcaggagaactgcttgatgaacccaggaggcggaggttgcagtgagtcgtgatggagccattgcaatactttgtctcaaaaaaaacaaaaacaaaaacaaaaacaaaacaaaacaaagcaaaataaacagaaatgtattctctcacagcgtagaggccagaagtccaaagtcagtgtcactgggctgaaagcaaggtgtgggcagggctgtgttcctttgggaggctctgggggaaaatctgttcctctccaattccagcttatgggggctgctggcagtcctgggcttggccacatcacgccagtcttcaaggccagcatctccacatctctgctctgcctacacagcaccttctgtctatgtcaagtctccctctgcctccctcttaaagggcacatgtgatcatttttggaacccacctagataattcaggagaatctacctcccctcaggtcccccttctttttttgagacaaagtctcactctgtcacccaggctggagtgctgtggcaccatcatagttcactacaggcttgacctcctgggctcaagcaatcctcccacctcagtctcccaaatagctgggaccacaggtgcacaccaccatgcccagctttttttttttttttttttttttttttgagatggaatcccactctcgccaggatggagtgcagtggctccatctcggcttactgcaacctccacctcccaggtccaagcgattctcctgcctcagcctcccgagtagctgggattacaggcacatgccaccatgcccagctaatttttgtatttttagtagacacagggtttcaccatgttggccaggatggtctcattctcttgacctcgtgatccgcccacctcagcttcccaaagtgctgggattagaggcgtgagccaccaaacccagctttttttttttttttttttttttttggagagagagtgtctcattttgttgcccgggctggttcaaactcctgggctcaagtgatcctcccacctcagcctcccaacaccctgcgattacaggcatgagctaccgcacccagccagatccccatgttaagatgcttaactcaatctcatctgcaaagactctttttccttctacggaactaggatctctttggggaggcatgattctgcctccctcagcagagtggacagaatctgagggtggataatttacaaatctgactgtggagtgtcaagaatgaggatgatgccagggtctgtaaccagagcaatcagaggcccctgagacggggccgcatgagaaaggggcaggttagggagaggccaggagatccagaggtgttgggtctgagatgcgcatcagacatccaagtgttgttgctgggtgagtctgaaggtcagagaagaggtcaggctggagagaattttggaagaccattgatggtacctaaagtcatcttctccatgcaggcattctccccaggggagctcactcagccttctcactttaggtaacatcaacagtcttccaaaagttggagaccccggctggccagcattgacaggagagagagtgaggaggaaccaggtgagaacgaggccggagacagaggaggcaggaggtgagaggaggccagagacagcggccctgtaaagaaaacattcaggctgttggccgggcgcggtggctcacgcctgtaatcccagcacttggggaggccaagcgggtggatcacaaggtcaggagttcgagactagcctggccaatatggtgaaaccctgtctctactaaaaatacaaaaaattagccgggcctggtggcgggcgcctgtagtcccagctactccagaggctgaggcaggagaatggcgtgaacctgggaggcggagcttgtagtgagccgagatggcgtcactgcactccagcctgggcgacagagcgagactctgtctcaaaaaaaaaaaaaaagagagaaaacattcaggccggcatggtggctcaagcctgtaagcccagcactgggaggctgaggtggaaggatctcttgagccaaggagttttcaagatcagcctgagcaatatattgagaccctcatctctacaacaaataagaaaattagcagggcatggtggtgcacgcctgcagccccagctaccggggaggctgaggagggaggatcacctgagcctgggaggtcaaggctgcagtgagccatgatcacgccttgcgccactacactccagcctaggcgacagaatgagattcttttaaaaaaataaatataaggccgggagtggtggctcacacctgtaatcccagcacttcgggaggccaaggcagatggttcaactgaggtcaggagttcgagaccagcctggccaacatggtgaaaccctgtctctactaaaaatacaaaaaattatctgggcgctgtagcagacgcttgtaattccagctacttgggaggctgaggcaggaaaatcacttgatcctgggaggtggaagttgcagtaagccactatcgtgccactgcactccagcctgggagacagagcaaggctccgtctcaaaaataaataaataaaataaataaacattttataaaaagaaagcagacgggcgcggtggctggctgggcgcggtggatcatgcctgtaatcccaccactttgggaggccaaggcaggtggatcacaaggtcaggagatcgagactagcctggccaatatggtgaaaccccttctctactaaaaatacaaaacttagctgggcatggtggtgcgtgcctgtaatcccagctactcggaaggctgaggcaggagaattgcttgaaccagggaggtggaggttgcagtgagccaagatcgagccactgcactccagcctgggcgacagagtaagactctgtctcaaaaaaaaaaaaaaaaaaaaaagagaaaagaaaagaaaatattcgctgggcacggtagcttatgcctgtaatcccagcactttgggaggcctaggtgggtggatcacctgaggttgggagtttgagaccatcctgaccaacatggagaaacccaatctctactaaaattacagaactgccgggcgtggtggcacccgcctatgatcccagctactccagaggctgaggcaggagaatcacttgaacctaggaggcagaggttgcgatgagctgagatcacgccattgcactctagcctgggcaacaagagcaaaactccatctcaaaagaaaaaagaaagaaagaaagcattcaggggagtgggagccagtgttgcaccggatgtagctgagaggtcaagacaagcaggaggtgtgatgttggacccaacaccatggggaccccgacaagagcatttccagagtaggaacagcaagatgtgaacatttgattggaaatggtgtaagagagaactgagaacgtctcttgtgagaaattttgctgtaaaaggaaacggagaaatggggctggagctggaggaagtccagagagtttttgttgtgattttgttttaatgtggaagaagtgacgatgtgtctgtgtgcccgtgggaatgagtacgtgggggctggggacctgctggagcaatgaccttcaggaagcaagagaaaatggggaaaataggccaggcacggtggctcaatttgggaggccgaggtgggcagatcacttcagcccaggagctcgagaccagcctgggcaacatggcaaaaccccgtctctacaaaaaaaaaaaaaaaaaaaaaaaaggtagccgggcatgatggcacgtgcctgtaatcccagctactacttgggaggttaaggtgggaggatcatctgagcccgaggaggttgaggtttcagggagccatgatggtgccactgcactccagcctgggtgacagagaccccatctcaaaaaagaaaaaaaaaaaaaagaaaatgggggaaatccccaaggggggtgacgttagagacagctgatccatcccaacaggacccaaaagcacttaccagcacagaagccaggaggtggggcagtcggcaggagacgagggaattagggtgttctcttctagtgaagcttgtgagcaaggatggggaaaggagagagacacacttggaaccctcactatgagcaagggaggtatggagcgtggctcccaccccagtggacgcctggaggggagggtcaggaatttaaagtgaaaacttgtgtttcctccaaccatgctaaccaatgagggcacacacttgcagaagacagagagttgccagcactttgggaggcctaggggggcggatcacctgaggtcaggagttcgagaccagccaggacaatatggcaaaaccccatctctactaaaaatacaaaaattagccgggcatggtggcacacgcttgtaatccagctacttaggaggctgacgcacaagaatcacttgaacccggaaagcagagattatagtgagtcaagattgcgccactgcactccagcctgggcaaaaagagtgagactctgtctcaaagaaaaaaaatacaaggggaagggaatgagacaccaccttttgatgggagagtgagaaataatttggcatgtcacagtgatattctcttccattttccataatcaactccattggtgttttttgttgttttttttgtgttttttgagacggagtctccatctgtcacccaggctggagtgcagtggtgtgatcccggctcactgcaacctccacctcccgggttcaagcaattctcctgcctcagcctcccgagtagctgggattacaggtgcatgccaccacgtcctgctaattttttgtattttagtagagacggggtttcaccgtcttgcccaggctggtctcaaactcttgagctcaagcaatccacctgcctcggcctcccaaagtgctaggattacaggtgtgagccactgcgcccagccaactcaattgttatactctacatttaggtctttattctatctggagtctatttttgtatgtgctgctacatagggacactttagtaggattatttttaaattttttaaaaaatttcaatagttttggggtacaggtggtttttggttacatggataagctctttttttttttttttttttgagatggagtcttgctttgtcacccaggctggagtgcagtggcgcgatctcggctcactgcaagctccgcctcccgggttcatgccgttctcctgcctcagcctcctgagtagctgggactacaggcgcccgccaccatgcctggctaatttttttgtatttttaatagagacggggtttcaacatattagccaggatggtctcaatctcctgacttcgtgatccacccgcctcggcctcccaaagtgctgggattacaggcgtgagccaccgcgcctggcatggataagttctttagtggtgacttctgagattttagtgcacttgtcactggaagagtgtacactgtatccagtatgtagtctttatccctcaccacctcccaaccttccctgccccaagtcccagagtccattatatcattcttatgccattgtgtcctcataccttagctcccgcttacaagtgagaacatacggtttgtggttttccattcctcagttactttacttagaataatggcctccaaggctgggcgcggtggctcacgcctgtaatcccagcactttgggaggccaaggtgggtggatcacatgaggtcaggagttcgagaccagcctgaccaatatgatgaaaccccttctctactaaaaatacaaaaaaattagccgggcgtggtggttcatgcctgtaatcccaactactcaagaggctgaggcaggagaattgcttgaacccaagcggcacaatctcggctcactgcaacctccgcctcctgggttcaagcaattctcctgcctcagcctcccaagtagctgtgattacaggcatgcaccactacactctgctaatttttgtatttttactagacatggggtttcaccatgttggttaggctggtctcgatcgcctaacctcaggtgatccacccgcctcagcctcccaaagttcatctggaattttgatgaagattgctgtgggcgggcacagtgggcagcagcgagacttcgtctaaggaaaaaaaaattaggtgtgatgacacgtgcctgtagtcctagttacttgggaggctgaggtgggaggatcacctgagctcaggagtttgagggtgcagtgagctatgatggttccactgcactccagcctgggcaacagagtgagaccgtgtctcaaaaaaaagttctgcccatcaaccaatgagtgcataaaggaaatgtggtacatatacagccgttaaaaggaatgaaatcatgtattttgcagccacttggatggagctggagacattattcttttttttgtttgtttgagaggaaggtcttgctctgtggcccaggccagagtgcaatggcaggatctcggctcactgcaaactcttgggcagatcatgaggtcaggagttcgagaccagcctgaccaacatgtcgaaaccccgtctctactaaaaatacaaaaattagccgggcatggtggcgcgtgcctgaaatcccagctactgaggaggctgaggcaggagaatcgcttgaacccgggaggcggagattgcattgagccgagatcatgccactgcactccagcctcagtgacagagcgattctcagtctcaaaacaaacaaacaaacaaaaaccacttcaagccgggcatgatgcgggtgcctgtagtcccaggtactcaggaggctgaagcaggtaggatcgcttgaactcaggatttcgaggctgcagtgagctatcatagtgctgctgtgctccagcctgggcgacagagcaagacccctttctaaaaaaaaaaaaaaaaaaaaaaaaaaaagataagatatgaaaacaaaacagccgggtgcggtggctcacgcttgtaatcccagcactttgggaggccgaggtgagtggattacctgacgtcaggagtttgagaccagcctgactaatatggtgaaatcccgtctctactaaaaatacaaaaattagccaggcatggtggcgcgtgtgtagtcccagctactcaggaggctgaggcaggagaatcgcttgaacctgggaggtggaagttgcagtgagccgagatcgcgccattgcgctccagcatgggggacaagagcaaaaactctgtctcaaaaaacaaacaaagaaacaaaacagaaaaagtaaaaaggagaaacgaaaattaaaaaaaaaaaacaaaacaaagaaataaaataaaataaaaccaattcacatagccacgagggggcgctgaggcctcacgtccacacgtagagggctgcggtgcttggagacaacgtggccacctgggagtacggttcttgggcaagcgcctactgtgcgcccggcgccgttctacacaggaacacagcgcttttcaaggtaggcgaggagctaatattctgaagatggtggtggggggcggtgaacagacaatagaatagacagaccagagtgtaatatttttttttttgagatagggtgttgctgtgtttcccaggctggagtgcagtggtgcaatcatagctcactgcagcctcaaactcctgggctcaagcaatactcccacctcagcctccagagtaactaagaacacaggcatgcaccaccacgtctagctaattttattttttgtagagacagggtctcccctgggctggtctggaactcctggcctcaagtgatcctcctacctcggccactcaacgtgctaggattacaggcatgagccaccacgcctggccaataaattctataaaaaaataaataaatcagcagggcacggtggctcacacctgttatctcagcactttgggaggccgagacaggtggatcatgaggtcaggagttcaagaccaggctggccaggatggtgaaaccctgtctctactaaaaatacaaagaaattagctgggcgtggtggcaggtgcctataatcccagctactcgggaggctgaagcagagaattgcttgaacccaggaggtggaggttgcattgagtagggatcatgccactgcactccagcttgggcaacagagtgagactccgtctccaaaaaaattaaaatcaatcaatcgatcgatcggtcaagtgacaggatagtgactgagggtgctccttagattaggtgctgcagaacacctctctgagatgacatctacatgatggtgaggatgagagaaacacggggagaactgcaggcagaggcaatgtggccacgggtcatggaggggccggtaggtgggtctgaggacgggagagaagctggtgtgggtgagggtcagacagcagagggctgaaggcaggaaggtgacagggcgcagtgtggccaggaggactaccaaggaaaggctgtgaaaagtggtgactgtgaaaagtggtgacatgaaatgtcttcaggatgggttttaattttttatttatttagtttttttgagacggagtctcgctctgtcacccaggctggaatgcagtggcgcgatctccactcacggcaagctccgcctcctgggttcactccattctcctgcctcagcctcctgagtagctgggagtacaggcacctgtcaccacgcccggctaattgttttgtatttttagtagaggcggggtttcaccttgttagccaggatggtctcgatcacctgaccttgtgatccgcccgcctcggcctcccagtgttgggattacaggcgtgagccactgggccctgcctccccgccccccgccccgagacggagtctcgctctgtcgcccagactggagtgcagtggcatgatctcggctcacttcaacctctgcctcccagattcaagcaattctcctgcctcagcctctggaatggttgggactacaggcatgcaccaccacatccggctaattttttttttctgtatttttagtagacacggggttccaccacattggccaggctggtctcgaactcctgacctcaggtgatcctcctgactcggcctcccaaattgctgggatgacaggcatgagccagcacacctggcccagggtaagttgttaaatggccggcaaggtgtctcacgcctgtcatccctgcactttgagagactgaggcgggaggatcacttgagctcaggagtttgagaacagcttgaccaacatagtgagacctcatctctacagaatatttaaaaattatctgggcatagtggtgcacacctatagtcccagctatgtgggaggctaaggcaggcggcttgcttgagcccaggaattagaggctgcagtaagttatgattgcaccattgcattccagccggggtgacagagtgagactgtctctaaaaaaaagtaaaattaaaaaaagcaaagagtaatgttcggaatgtctgccttgttggtacaaaaggggtgactagaacatagcttcacacttgtttgtatttgcagaaaaaaatattgcagtaatactaagaaattgattttctttttaaaatggtaacctttggaggaaagaggaagagagaacagggtggatggaggttagggtgagagtgagaaaaggcgttgtctggctgctgagtgggaaacggaccacagacggtgggaggcaaggagccagctgggtggggaggctagtgtggctacaaggcggggagggcggcgcatggtgggttaagtacactgtgtcttttggggctttttttttttttttgaggcggagttccgctcttgttgcccaggctggagtgcaatggcgcgatcttggctcactgcaacctctgcctcccgggttcaagctattctcctgcctcagtctcccgactagctagaattacaggcatgtgccaccatgctcagttattattttttgtatttttagtagagacggtgtttcaccatattggccaggctggtctcgaactcgtgacctcaggtgatccacccgcctcagcctcccaaaatgctgggatcacaggtgtgagccactgctcctggcccctttggggcttttctgtatctgaagagctgtggttcagtgttcctaagggacttcctgctggccagaaatggtgaccataggagctaatgatcagtcccctccttacaatgacagggttgataacagtgcttaccatgtgcctgggcctagcgtattctctgcatttaaacctcacaacaggctgggcgcggtgtctcccacctggaatcccagcactttgggaggccaaggcgggtggatcgctggagcccaggagttcgagaccagcctgggcaacatggtgaaatcccatttctacaaaacataccaaaatcagctgggcttggtggtgtgtgcctgtaatcccagatgcttcggaggctgaggtgggaggatcatttgagcccctgaggcagaggtagcagtgagccaagatcacaccactgtaccccagtgtgggtggcagagtgaaaccctgtctcaaaaaacaaaataaaacaaaacctcacaataatccctggaggtaggtactattaaaatcaccttcattttacagatgtggacacagacacagagaagttaggtgactttctcaagatcacacagctaggaagtgccacttgaatccaggcagtaatccaaaatccatgttcttaaccactaaccactgtggtgtgccgtttcccaattcttttcctttttttttttttttttttttttgagacagagttttgctctgttgcccaggctgtagtgcaatggcccaatctcggctcacggcaacctctgcctcccgggttcaagcgattctcctgcctcagcctcccaagtagctgggattttaggcaagcgccaccacgcccggctaattttgtatttttagtagaaacggggtttctccatgttggtcaggctggtctcaaactcccaacctcagatgatccacctgcctcggcctcccaaagtgctgggattacaggcgtgcaccgtacccggcccttttttattttattttattttttttttgagacactgcttcgttacccaggctgcatgcagtggtgtgatcgacctcctgggctcaatcctgtgaccttggctgggattagagacttgagtcaccccgcctggcctcccagtccttcactgtagcattgttctcagttaattgtattgccctttagattggttatctccacggattgcgagcaatcatgaagaccttagtatgaattagccaatattttcccatcactgaacaatagcaattgttgctgtggtttaaagggaccctgtagagcaggagttaaatagttgggctctggagtcataatgcctgggactgaagcccagcaccaccatttcccagccatgtgactttgaacaagtgacatccctaatctgggcctctgtttcctcatctgcaaagtacccattttccagatgaggatactgaggcctaacacacgcacacacaggactttagaacctgggttttgagcgcataccgcctccaccaggacaaggaacccaaacgagattctgtgagagggaagtagaaagggttctgcaggcccaagtggggtgttctaggacacgggcttaggagctgggatgtcagcaggagggacttgcccattctctatacagtgtggaggaaagggagcactggaagccttgggtccatctgcacagagacagcaaggtcacctgaacggctggacaggccagggtgctcctggatgctcctcctcaggggggtcttctcttcctcccagactggagctcagacacccgggataagtgcttaatcctggcggggccacttaatggcacaggtggggacagggccctggggccccaacttcagtcagtggaggccacgtgggagatgtactttgtccttggtgagacagcccagctctgaccctgccctggtcctaagcacggccacagccccaccccagctcctgattatacacacctgggaccactggtccaaccagaaccattagaatgtagccgtgccattaaaggccattaaaaggcctggcatggtgtctcacacctgtaatcccagtactttgggaggccgaggcaggtggatcacgaggtcaggagttcaagaccagcctggccaaggtggtgaaaccctgtctttactaaaaatacaaaaattagccaggtgtggtggtgcacgcctgtaatcccagctattcgggaggctgaggcagaagaatcacttgaacccaggaggcagaggtttcagtgaactgagatctcgccactgcactccagcctgggtgacagagcaagactccatctcaaaaaataaaataaaataaaataaaataaaatgttgaaatataggccaggcctagtggctcacacctgtaaacccagcactttgggaggctgaggtgggcagatcacttgaggtcgggagttcaagaccagcctggccaacatggtgaaaccccatctctgctaaaaatacaaaaagtagccaggcatagtggtgtgcctgtaatcccagctacttgagaggttgaggcaggagaaatcacttgaacttgggaggtagaggctgcagtgagctgagatcacaccactgcactccagcctggatgacagagcgagactctgtctcaaaaaaaaaaaaaaaaaaaaaaaatacggctgggcgcggtggctcacacctgtaatccctgcactttgagaggccgaggcggtcagatcacctgaggtcaggagttcaagaccagcctgaccaacatggtaaaacccatctctactaaaaatacaaaaaattagccgggcatggtggcgcatgtctgtaatctcagctactcaggaggctgaggcaggagaatcgcttgaacccaggaggcagaggttacagtgagccgagatcgcaccattgcactccagcctgggcaacaagagcaaaacttcatcttaaaaaaaaaaaagaaagaaagaaagaaaaaaaagacaatgttgaaatagagggctgggtgtggtgggtgaattgcttgagcccagaagtccaagaccagtctggacaacataaggagaccttgtctctacaaaaaagtaaaaaaatagccagccatgatggctcacacctgtaatcccagcattttgggatgccaagttaggaggatttattgagcccaggaggtcaaggctacagtgagctatgattgtaccactgcactccagcctgggtgacaaagtgaggctctgtctctaaaacaaaattaggtcaggcacagtggctcacccctgtcattgcagcactttgggaggccgagacaggctgataatttgagcccaagagtttaagaccagaccggacaatacggcaagatcctgtttcttaaaaaaaaaaaaaaaaaaaaaaaaaaaaaaaaaaaagccaggcatggtggtgcatgcctgtagtcccagctacttgggaggctgaactgagaggatcacctgagcctgaggaggtcaaggctgcagtgagccaagattgcaccactggactccagcctgggtgacagaatgagaccctgtctcaaaaaacaaaataattttttttaaacaataaaattaaaaaacataaaataaaattttttttaaaaagccactacccacttctgatggcccagctgctcccttgggaccctccaggcctctccatgccccagcatgaaaggattaacctgggttcaatagggggcttccctgatccagctctgggggccattgtccttcctgactggtggatggccctggcaatatttggtgttttccctggctctgccccaatatcaatccctccacccataagttcagagtcctcagagaagggtatccatttcacagaactcctatgcatccttcaaagcccaccttaatgccacttccttcaggaggccctcccagatttcttcaccacccccagagtgaatagctccctcccctctgccaagctcccaggtatcttgagccattcagcacactttgttctgattctcacactcaggcccttctccccccatagtgtgtgagcaccttgatgccagagaccatcttcctctcatctttgcagcctcagtaccaagggccattataagcacagcgcagatttcatggagtggctgaatgatttgtttgctgtgtgatcacctgtactgagtcaatatcggtcacctttggtcatgagcatgccccttgacccagattcctgcaggagcctgcatataggggccctgcttgctgggactggggatgggggtggggtggggagttcaagggaaggcaaggtctaggatataaatcccaagggcgtgggctcagcagggcccgttctcatgctttctggcccgggaggagtgattctccatctggcaggcccagctgcagtgctgggacagggacatgagcagaggccacaggaggagagagggaggttgtggggggagctcggggaagcccatggtaacccggggggaggaaaaacagccacacagtgttattgttacagaaccattaaatacaacttatacacaagcaagctgggcggcgtccggggggcagggagagtgcaagagggtcaggggtgagcagtccgggcccggtcctggagggggctgaggctgccgtcgtgggaggggcttggctggcggaggccgggctgcctgtggaggccttgaagctttgccagcagctcctggatgaagtcctgagacagggtgggggagctgagaacatgggaacagtgcgggggcaccctctgcccctgtccagcccagtccctgacctgggcgcctcctcctgttctctgattgtggggtggggggagttaggggcggaggctatagacatagagagaaaagtgagccgggagaaagacagagatggggaaagggcgatgggagggatggagagaaagagctaggaagagagatagagatccaaggagacagatacggagtgggggagggggagaaacagacacagaaacagagagacatgtagagatagagacagagagagacataaggacagagaaagaaacagagacatgtggagacaggtccccagagatagatccagggcgaacagaaatgcaatgacgtttgtccctagagctagttggagaaacatgaatagttttcccttttaaagcagggaaggaagtgggaggggttgggccgctcagcttcagggcctgggaggatggagggcccccagaggtggggaagggagcccggggtggcggaggcagtgacaggggaggacagagggagactgagcccgaaggctggtggccaaaggacaggcacaggagaggcaaaaacagggcagatgggggaggacagaatggagccccctcagcagatgggggagagagggagagagacaagtaggaggacaaaagacacccctggagaccagaaagagctgcggagggcaggttggggccgggggtggtggggccgggtggtgttccccagagacccttctgccagcttcttccccctcccccatcagagtacttggggccagaacagggagagaatgagggagagaaaactcacctcgacaggtttcccacatgacttcaggagtccctaaaacccccaaccaagaacaaaacaaaacagtaaatgactaacacctactcccctccagccccttccctttcccaaaaggccccagcagcaagacaaatggaagtcagactccagggtggactgcccaccaagcttcaagagaggaacagagcccaaggggcatgtggatcgactcagggcaggggtgagttactagatccagagagggcgagagggtcacacagcacttccctcctctaaaaaggtataagccataagcaaagacatggctgccaaactgcctgggttcgatgcccagctctgctccttctgagctgtgtgacactgggcaagggattcaacctctctgggcctcattttcctcatggggaaaatggagctcacactagcgcctgcttcggagggttttgtgagggttaagtgagtgaatacatgtaaagccatcacaccagtgcccggcatctagtgagcactcagtaaacacgtgaactattgctattatttttagggaggtgcaaagtgggaggctgggggacacgtccccccacctacctggattttccggcttctctcctcttcactctctaactccaacaattcatcaatgttgatctcatcgggcatgtctgcctcctagggccagggagggaggggtgcttaggatccccttccctccctccctcgcctttgtccagggctctgcaggagccccaccggccccagggcccagctggcgggttctggagcattaatgtggcagtccgggacagcactgccaagacgggacatctgggtgttgggggggaggggtgacagatgggctgagagagccccggggccctgtaccagcccgatgcctgggcccatgggccccgggagcctcggggctggcacgggtctctcgccttggctctagttcccacagaggaaaacaggcctagtggagtcctggaatgtcagattctgggattcgggagaggagctggcttctgccctttcaaggaaaagtcttagcactaggtgcaggggaggagaggctggcagccagcagccagctggggcggccccttcccccaggggacaggaagggaggggacaggaagggaggggacggcttgggccagcccccagagggccaaaatgcagcctggtgagaccgaagggaggaccaccgaggcccctcaaggtgggtgggtgggatgagtcatggctcaactcagctgctaagagcggggcgctgagtgtggcctctacaggcagtggcccaagcgcaggctggctcagtacccctgctgggaataggacccagctgtccccagctgtcgagggagcaagagagccttggggttatgaatcctttcctccccaacccaaagtccggctgtcggcttcaggcctggggcttcagggctggatggtcctggttcatgtgtggtgaaggggcttcagcaaggacacaggtgtgtgagtctctgccagggccacagcctgatgccaagggcctggggctggccgaggatgcagagggacctggcatcgtgcagtggcttcgtatagtggactgtggtcctgcaggtgtgaggtgtgtggctctggcttgggtgtgtgacacatcagcatgtgtccacagtcagctgtggggcccaccacctgagaatggcctcatagatgccacctgccactagcaaccagattggttcacctgtatgggcccaggtgtgagtctgagaacagagggactgcatgtcaccatgggagaagggccatgccttccaccattgtcgcaccatgaagaggaggactcgtgggtcctgtgtacactgtagcatacagaagtcacagaaggccaggcgcagtggctcacgcctgtaatcctgacattttgggaggccgacaagagagaattgcttgagcctaggagttcaagatcagcctgagcaacatagcgaggccccatctctttttcttttttcttttttttgagacaaagtctccttctgtcacctagggtggagtacaatggcgcgatcttggctcactgcaacctccgcctcccgggttcaagtgattctcctgcctcagcctcccaagtagctgggattacagctgcctgccaccatgcccggctaatttttgtaattttagtagagacagggtttcaccatgttggccaggctagtctcgtactcctgacctcaagtgatctgcccaccttggcctcccaaagttctgggattacaggcgtgagccactgtgctcggccaatgaggccccacctctaaggaaaagaaaaaagaagtcactgaaagtgtgacttcaagcagaaactcaagtgatgaagtacctgtgtgtgtcaatacatgtagctgtggcttaggctcttgtgtgcctgtgagcagcggtgggttctgcagttgtatgtccacctgttcctatagcttacagttttttgtttgtttgtttgtttttgagacggagtttcgctcttgttgcccaggctggagggcaatggcgggatctcggctcaccgcaacctcctcctcccgggttcaagcgattctcctcccgagtagctgggattacaggcatgtgccaccacacccggctaattttgtattttttagtagagacgggatttctccatgttgatcaggctggtctcaaactcctgacctcaggtgatccgcccgcctcggcctcccaaagtgctgggattacaggcgtgagccaccgtgcccggtgcttacacagttttatgtctgggtgtagttataaattctgttgggttttgtttgtttttgagacacggtctcgctctgttgcccaggctggagtgcagtggtgcaatcttggctcactgtgaccttggcctctcaggctcaagcaatcctcccacctcagcctcctgaggagctgagattacaagtgcgtgcatgccaccacgcccggctaagttttaagatttttggtagagacaggttttccccatgttgcccaggctggtgttgaactcctgacgtcaagcaatcctcctgccccggcctcacaaaatgcgtgagccactgtgctgggccaatttctgttgttttatgtctttgagtggctgcggatcagcgcttgtgcttgaaggtggtcagttttttctttaggagataaggaagggccgtaacttgagtcattttgtgttccagtggggttgtgctgtgtctgcctacggctgtggcccatgccgctgtgtctgcgggtggctgtgactgtagcatatgttgaactgtaggtgacccccccccagcccccgcttgtgtccttgtgggtttgtgcatggctgttacttctgggctgtgtccgtgagtggctatagcttccttcactgtgcacatctgtgtctgcttttgcttcctttgccgtgggtctctgtgtggctgtatctcccctgtcaccatgtctgtgtttggctttatgacaccccccttcccccactctttctccagacgtggcggtttcagctcaacttagcctcctccctcctcatgctaaacccctggccctccacaggcgtttggacacatctctggagacccaagtctttgtgtgttgctctcggtgtgtccacaagcacaatgccatagagcacggatggccaggccaatgagtgcccggccctggggcgctcgtcctcttgtgcagaccaggctggccgtgcaccagcgagtgtgcaccgagaccccaagggcgtggggtctccgcgcccgggctctatctgtccccgaccacccccgagccctccccgggctcaccatgccgcggtacagctcctccaggcgcccgtcgatccacttctccacgtccagccgccgctgcagctcccgccggtcatacttgacggtgacgcgcgcgtgccgcttctgcagccccccgggactgccccctggcccgcgggcccgcgatggagactgcagcttgctcagcacgcgcttgcccagccgctgagctgccatcgcgctgctggacccagcctggccccgcgctgtgcgccttcgcctcgcgccccgggtgcttcttacgggccagggcggggctagccgggggcgggggctcgggctcgccgggaggtctgccccaccccggccgcctcaggcctcagtttccccgtctgcagtgcgagagtaggccgctgcgtcggcttgaggcacgcagtcgtgcgaagttgaggtatgggcggggacccagagtcccgggcgggtccctgcatcgggggctcccgggccgggatcctgtggggcgggggcctgggacagacactcgggacccggcctgtctgcgccctctggcggtggcggggtggggggctgttggtgcgggagcgcctgcgccgctgtcgctgtagaaggtcgagcggtcacttgttccttcgttcattcattcactcatccatccatttgtttgttcactcattccgttcaacgaatttttttttttttgagtcgatgtctctctttgtcgcccaggctggagtacaatggcgcgatctcggctcaccgcaacgtccgcctcccaggttcaagcgattctcctgcctcagcctccgaagtagctgggattacagggatgcaccacaacacccggctaatttttgtatttttagtagagacgggatttcgccatgttggccaggctggcctcgaactcctgacctcaagtgatctgcctgcctccgcctcccaaagtgctgggattacaggcgtgagccaccgccactggcccggttcaacgaatatctattaagtatccactctataccagacactgctttacgctccagggatagagcagggaacaaaacagacaaaaccagtcccacgcagttgacagttgtagccgggatacatgagaaacacagtaagtacggtattatacagtttattatcatataagtgctttggagaaatataaagcagagaaggagaaatggagtgagggtaaggttgcaattttagcgagggtggccagggaagtcccttacttcaaaacagtcttctcacttctaattataagcagcaataattatactctaaaatttaaatgtggctgggcgcagtggctcactcctgtaatcccagaactttgggaggccaaggagggtggatcacgaggtcaggagttcaagaccagcctggccaacatggtgaaactccatctctactaaaaatacaaaaattagctgggcctggtggcacatgcctgtaatcccagctactcggaaggctgaggcaggagaatcgcttgaacccgggaggtggaggttgcagtgagccaagatagcaccattgcactccagcctgggcaacaagagcgagactctgtctcaaaataaataaataaataaaataataataaataatttttttaaaaaggccaggcatggtggctcatgcctgtaatcccagcactttgagaggccgaggtgggcagatcacgaggtctggaattcaagaccagccaggccaacatgatgaaaccccatctttactaaaaatacaaaaaaaaaaaaaaaaaagccaggcgtagtggtgtgcacctgtaattgcagctactggggaggctgaggcaggaaaattgcttgaacccaggaggcagagattgcggtgagccaagatcgcaccactgcactccagcctgggtgacagagcaagactccatctcaaaaaaaaaaaaaaaaattgtagagacagggtctccctatgttgcctaggctgttctccaattcctgggctcaagcgatcctcccacctcggcctcccaaggtgctgggattataggcatgagccacctcactccaccagccagccataatgtaaaacttttgagtttcaaagaacatcatcaagaaagtgaagagacaacccatggaatgggaggaaaaaaattgcagtcatgaaactcataaggtgctgggacgagccaccacacctggccaaactatacactttaaaaaggtgagttgggccaggcacagtgactcacgcctgtaatcccagcactttgggagggcaaggcggatggatcatcggaggtcaagagttagagaccagcctggccaacatggtgaaaccccatctccactaaaaatacaaaaattagctgggcatgggggcacatgcctataatcccaactactcaggaggctgaggcaggagaatcgcttgaacctgggagggggatgttgcagtgagctgagatcatgccattgcactccatcctgggcaacaaaagtgaaactccatctctaaataaataaagggtgagttgtatggtatgtgagttatatctcaataagactgtgtttttttttttttttttttttttttttgaggcagaatctcgctctgttggccaggctggagtgcactggcatgatctcagctcactgcaacctctgcctcccaggctcaagcaattctcctgcctcagcctcccgagtagctgggattacaggggtgtgccaccacgcctggctaatttttgtatttttagtagaaacggggtttcaccatgttggccaggctggtcttgaactcctgacctcaggtaatccacctgcctaggcctcccaaagtgctgggattacaggcgtgagccaccgtgcccggcttcaataaagctgttttatttcaaaattaaaaacaggccaggcgccatggttcacgtctgtaatcccagcactttgggaggctgaggtgagtggattatctgaggtcaggagtttgagaccagcctgaccaacatggtgaacccgtctctactaaaaatgcaaaaaaaattagccaagcatggtggtgcacccctgtaatcccagctactcaggaggctgaggtgggagaattgcttgaacctgggaggcggaggctgcagtgagctgagatcgtgccatcacactccagcctgggcgacagagaaagaccccatctctaaaaaaacaaaaataaaaaacaactatccatagctacccatgaccttcagtctaaaggccaaactctggtttagcagtcccatctctgccagggacagtcccatttcagcaccagcacctttcactcgcagttccctctgccaggaaggttcttccctagaatatcatcagggctcactccttcacctccctccaatgtcactgttcagtgaggtcttccctggccacgctatttcacactgcaactctcgtgcccctcatccagctctgtttgatacataacacttaccactttctaacattatatatatatatatatatatatatatttttttttttttttttttttttttttttttttttttgagttggagtcacctcaggctggagtatagtattgtgatcatggctcactgcaacctctgcctcctgggttcaagagattctcctgcttcagcctcctgagtagctgggactacagttatacaccactgtgtccgcttactttttatattttcagtagagatggggtttcaccatgttggtcaggctggtctcgaactcctgacctcagacgatctgcccgtcttgacctcccaaagtgctggaattacaggcatgagccaccatgcctggcctctaacattatatataatgtactcatttaatgtattgtccatgccaggcgtggtggctcacacctgtaatctcagcactataggatgctgaggcaggaggagcaattacatccaggagttcaagatcagcttgggcaacatagtgagaccctgtcgctacaaaaaaaaaaaaaaaaaaaaaaagccaggtgcaatagtacatgcttgtagtcccagttactctggaggctgagttgggaggatcacttgagtccaggagatggaggacgcagtgaactgtgattgcaccactgcactccagcctgggtgatggagtgagaccctgtctcaaaaagaaaaatgtcatattttctgttctgtgcagtgacagaaaaaaaaaattattgtctgtttcccaactagtagcatactaaaggcagggggacaggactggtccactttgggtacaggcaaaaagagggtgcactgtctgtagagaatttaaaaataaaaagctgaccaaggccgggcatggtggctcatgcctgtaatcccagcactttgggaggccaaggcaggcagatcacctgaggtcaggagttcaagacctgcctggccaacatggtgaaaccccatctccataaaaatacaaaaattagccgggtgtggtggtacaagcctgtaatcccagctacttgggagactgaggcaggagaatcgcttgaacccgggaggtggaggttgcgatgagccaagatcgtgccattgcactgcagcctaggcgacagacagagtgagactccatttcaaaaaaactgaccaaaagttggtctaatttttattttactttgcagtgacatttctaaacagtgtcaatgataaaatagtcctccccagggaagaaacagaaacaaaaaccttttggtggtctgctttctaaacaattgatgcaatataaaaaagggggaaaaaaacaattgatgcaattactgtcggttttttttttgttttgtttttgtttcattttttgagacggagtttcgctcttgttgcccaggctggagtacaatggcactatctcagctcactgcaacctccacctcccaggttcaagcgattctcctgcctcagcctcctgagtagcgcggattacaggcatccgccaccacgcccgactaattttgtatttttagcagacaggatttctccatgttggtcaggatggtcttgaactcccgacctcaggtgatccgctcgcctcggcctcccaaagtgctgagattacaggtgtgagccaaccacgcctggcctactgtcaaggttttttttttggtgtttttttttttttttttttttttttttttgagacagagtctcgctctgtcacccaggctggagggcagtggtgcagtctcagctcactgcaacctccgcctcccggattcaagctattctcctgcctcagcctcccgagtagctgggactacaggcgcccgccaccgcgcccggcctctttttttttttttttttttttttttttgagaacgagtctcgcgccgtcgctcaggctggagtgcagtggcgcaatgtcggctcactgcaaactccacctcccaggttcaagcgattctcctgcctcagcctcccaagtagctgggactacatgcgcccaccaccacgcccggctagtcttttgtactttttttcagtagagacggggtttcaccgtgttagcccagatggtctccatctgctgacctcgtgatccgcccacctcagccttctaaaatgctgagattacaggcataagccaccgcacccggcccttcttttttttttttttttttttgagacgaagtctcacactgtcgcccgggctggtgtgcagtggggcgatctcggctcgccgcagcctccacctcccgggttcaagcgattctcctgcctcagcctctccagtggctgggactacaggcgcgcgccaccacgcccggctaatttttgtatttctagtagagacagggtttcactatgttggccaggctggtctcaaattcctgacctcgtgatccgcccacctcggcctcccaaagtgctggggattacaggcgtgagccacctctttttaatgaactctgaaggatgataaaggccaagggacaaacattccaagcatcaggaatgttgatgcttggaatgtttctcaggacagatatggagatgcccaggcctcccaaagtgctggggattacaggcgtgtgagcccggcctcttttttttttttttttttttgagaacgactctcgcgctgttgctcaggctggagtacagtggcacaatattggctcactgcaaaccccgcctgccgggttcaagagattctcctgcctcagcctcccgagtagctgggactacatgctcccgccaccacgcccggctaatctttttgattttttcaccgtgttagccaagatggtcttgatctgctgacctcgtgatccacccgccttggcctcccaaagtgctgggattacaggcatgagccactgcgctcagccctccttttgagtttttgtgtttaaagttcaaaactggacagatgcagtggctcacgcctgtaatcccagcactttgggaggtcaaggtgggcggatcgtgaggtcagaagttcgagaccagcctggccaacatggtgaaactccatctctacaaaaaatacaaaaattagctgggcgtggtggcgggtggtgcctgtaatcccagctactcaggaggctgaggcaggagaattgcttgaatccaggaggtggaggttgcagtgagctgagatcacagcattgcactccagcctgggcaacaggtgaaactctgtctcaaaataaaataaaataaagaaagaagaggcctataccttcttccaagccttgacggctcagcacatacttctctgttttcatgctcaagcctaggtttagtaggcctgagtggcagtgggagattcaagtgctgggggagacctttggcctcacattcagattccaccttgagtcccatgatctcattgcaaggttagacttccattgtttaaggtaaataccattttgataactcagttacggcttttcatgtattattatgctaggagggaggctgaagagtgggagtggccctggctcctgaacacactattctctttcctgcctgaaggcctccgcatgtgccattcctgattcttggaatgtttgtcccttggcctttatcatccttcagagttcattatcaaagccacccctcacaaagcccttcctccgccaccccattcaaaagatctcttgttattttccatcccagcccctgattccttttctgtatagcactgtcaaagtgttttcaggccaggtgtggtggttcacgcctgtaatacaacacttttggaaggatgagacaggaggatcccttgaagccaggagtttgagaccagcctgggcaacatagcaagtcccctgtctccacaaaaaatttaaaaattagctggatgtggtggctcacatctgtagtcccagctacttgggaggctgaggtgggaggatcccttgagcccaggaggtcaaggctgcagtgagccaagatcactccattgcactccagcctgggcaacaagagcaaaacttccatctcaaaaaaaaaaaaaaaaagaaataatctaaaagtgttttcaataataatgcatttatgttgattaccttgttggctatcctctactcgtgtgcctgccccactccattcccctttctagagtctgttcacgtaactcctcttccaggaagccctctttgactcccaggcttggtcaggtgtcttctctgggtttccccaggggcttccttcctctcaattctgatgctgcctgtgctaagtatttgtctccatatctgtcctgagaaccttggagccagggctcggggctgtttttgcatgggcctatcacctcctccaggaagccctccttggccctctctcaggctggatgggaaagctgtctgggctcccatcatgccctggttttctagcgacccagcctctgatccctaagcttggccttccccatcacagctttcatcactttgtgctaagcttccgctatcactactctgggccgttcctgtttggtgactcagggaccagtctggcatggccaccgctgggtccccagcattaagccctggagcatgagcccagtgaactttgaaattcaggaaggaattcacaggaaagctgcggcgaggcgggcagaaaaccacaggcttccaagaaacgcgtgtctgccgccccctcctcccaccctgaggccagtcctagagcgaaggccctcctccgacgtcgtcaccaagcccaagggaagggtggcaggtgctcagcgggcagacgccccgccccgccccgccaggttctgttgggggcgaggcccgcgcaagccccgcctcttccccggcaccaggggcgggcccaggtgcgcccagggccggggagcggccgcgcaggtgcctgccctttgcgcctgcgcccagctcgccctgcctagccaggtgcgccccgccccctgcctgcccggccaccttcgggagccgcttccaataggcgttcgccattggctctggcgacctccgcgcgttgggaggtgtagcgcggctctgaacgcgctgagggccgttgagtgtcgcaggcggcgagggcgcgagtgaggagcagacccaggcatcgcgcgccgagaaggccgggcgtccccacactgaaggtccggaaaggcgacttccgggggctttggcacctggcggaccctcccggagcgtcggcacctgaacgcgaggcgctccattgcgcgtgcgcgttgaggggcttcccgcacctgatcgcgagaccccaacggctggtggcgtcgcctgcgcgtctcggctgagctggccatggcgcagctgtgcgggctgaggcggagccgggcgtttctcgccctgctgggatcgctgctcctctctggggtcctggcggccgaccgagaacgcagcatccacggtgagggccgggcgggtaggctggaggcggggcgcagggggcagaggctcgggggtcaacgggggtctgagcagggagaactggcgggggaggaaactgggggctacttgatggcgttcagcgggtgtggtggaaccagccctggaggattgagccttgaaatgaggtttgggagccttcgacagcgaagacgggcggaggagcgagggttaggagagtttccttcgggtggaggaagagtcaaggggtattgaccaagaaggcgtggcactgccccttcctgtggcaagaacggggtgaggagccgaattgaagaccagccttctcctggcggtggaaagttccatggccaaagctcagggagaggccaggcctgtgagatggtgggggttgggttgggtgacctggtggccgttttagactcggaagaagcccatctcacccctgcctctttggagattggacaagagcctcccctgaagtttttgtagttgagttgcagtaaagtaggtgcccgagaaggagggagcaagaaaggaaacaagctttggggaagaggaagctctgctaaggctcgagagagtattggcgttgagcagctggtgttggggtctttggattggcccttagaagtcggtggtgaataaggtgatttaaacttctacactcttaaggaagtgtggtctgaaaggtctctttgaacaagtgttgttataaccttaactgcttcagacaagcaccagcgtgttttgaaaagagctctcttgaaagcaagaattcattgattcagcaaaacttactgaggccctgctacgtgtcaggcactggcgctggttataacagttaactcagactagctgggttcctgcattcacagagctaatattccagtgggagaggcagagctagtgaaggtttaaaaagcacttgccatgagattaagttactgagaattaaatgaaccaggtgaagtacaccaacagggtgacgtaagatgttgggggcggctttagctcaggtggtcgggggacgtctccgtgaggagggtgacatctgagctctaacatgaagaatgaggcagtagccacacggagacctgggggaccagtgtccagttgcaggcaatagagtacaaaggccttgaagctggaacaagcttggttgggttcagggaaaagacagagccagcctggctggagcaggcgtgaaggaggggaggactggaggaggatgggaggtgggagaggttggctgcagccagatggcctagggctttatagacaggtgctggtgcttgaacccgggaggcggatgttgcagtgagccaagatcgcgccactgcattccagcttgggcaacaagagtgaaactcccatctcaaaaaaaaaaaaagaaggccgggtgatgtggctcatgcctgtaatcctagaactttgggaggccaaggcgggcagatcactggaggccaggagttcaacaccaccctaggcaacatgatgaaaccccgtctctaccaaaaatacaaaaattagctgggcatggtggtgcacacctgtagtcccggctactcgggaggctgaggcaggagaatcgcttgaagcccagaggcggaggctgtagtgagctgagatcaagccactgcacagcagcctgggcgacacagcaagactcagtctcaaaaaaaaaaaaaagagcaggctaggtgtgtaccaagtcatcacctgtggtaacttctggggactggttaatttctctgtgccctaggcaggagaaaaaagtgaattggtggggagaggctcagctgtaggtgactgggagtcaggaatgcagacgttgatcattcttgcaattcgaaccagaatttggcagctctgctggactttttcagtttaagtaattacgttaggatgtacctcccagttacctggcctcttgctacctctggtgcttactctgagctgggacatggcctcttgctacctctggtgcttactctgagctgggatgtgccatttaacctttgaaacagccgggtgcggtggtgaagttacttgccttgcccgaggtcactcggtagtagtaattgacaaagccaggtctcactgcagaggccttctctgttcagagtggcctacctgactgctgctgccgactggacctactgacctttcagaagtactagtgtctgactgggtgaactcatgccctcactcatcgtaagttctgtttgtttgaaagcttgaacagcttaatcggaggcagaaggcagttttgacttttttttcctcgctccttcctgattgcttctgttttctccggaagcgagtcatccactgggagtgtggtgttgctgaagctccatgcagtggctcaggtgctgctggatgagtgtggtggtgagggaggagtgaacagagaatgtgtgagggagggaggatgggggttggtcaaggaatttattctgtatgaaaacatgagggggcggagggccgaggtagatggtagggccagcagattgttggagttgaggttctgaagggaatgaaccagacagataggatgcagtgggtagtgagtgagatgcatgagagggaggttctgaagaggtggcagttactgagacaggtctaggtgtgaccctgagaggaagcgggggggcgagggtgggaggagatcaggtggaggtcttgggacctagaggtcagaggaccatctacctggatatagaaatctccaagaatgatcataagagcagcgggagaggtggcaggcccggagctaaagttgggaaggaagaagtagttgtctgggttggcagataacgtgccaggcggggtagtgaatgatttactctaataatggaagtctcccagctggggattttggggagggtggagggagaacagtccagaagcagctcccaggagcaaggagacctccccacttggaagggccccaggaggtgtgccctcaggggagattccaattaggtaagagggtggcaacaatgttcagaggagattgaggacatggaagatttgctcaagaccagtcctgagtaccagagggcccaggagttgggggaggggagatggggacaaagcaggccccaccgtgtgagagtgagggttaactcaggggtcggggcttcttgtgagaagcatcatgtggtctatgattgatgtgttggtgacgctctgagtagtgagggcaggtgggaagggacaggtggacgggccggacaaagagtgtcctgactccaacctctgcagacagaggtggggggaaagctgagcttatgccaggtgagaaagctcccctatctagcgttagggacagttaccgtctggagtggaaagcacgcagagattataaactgtccactcccaggaagcttcacacagcctttatgtgacttgtactttttccagaattgggattttttaaacgtaaaaatgtagtttttggctttgcctgaaagacatgaagatgtaatggaaccaaaccagaacacaggcctgttttcctgcccagcagtccctggcaggagccgagtacctctttcaggcaggagatatgccattccctagcctgtagatcttactcagcttgcctcatctcagctactgcttgccctctgtctctgtaggcctttggcttgtgacccctaccttaaacatatgctccatttagtaaatggtaacacgtaacagttctttataaattgcacattacagtgtgagacagagagagagcatgcgcgcgcgcgtgtgtgtgtgtgtgtgtgtgtgttacggctggctgttggggaaatccttatatcaggtagctgcagatatgcaggatttttttcttttccttttccccacccaggtggtaaatcctggtatttggagggtcctgaaatgtgtaatgttgctcaacaccaggccagatcatatatttcctcagcagaatagaaacttgaaaggtcctttaggagtggccagttaggtgtagttcttgctgccaataactttgtgcctggccctgggcatcagaacttgtgttaatggttacttggcttaaggtcttttgtttttgtttttgtttgtttttgtttttttgggtttttttttgagacggagtctctctcatcgcccagtctggagtgcagtagcgcgatctcagctcactgcaatctccacctcccgggttcacatcattctcctgcttcagcctcctgagtagctgggactacaggcgcccgccaccacgcccggctaattttttgtatttttagtagagacagggtctcaccaccgtgttagccaggatggttcaaggtcctttgttgattcttcttgggaatttccactggaggcaagcagggcaacacttatttgagaacctctcctgcacctttttttttttttttttttttttgagacagagtcttgctgtgtcactcagactggagtgcagtggcgccatcttggctcattgcagcctctgcctcctgggttcaagtgattctcctgcctcatccgcctgagtagctggggttacaggtgtgcaccaccacacccagctaatttttgtatttttagttgagatgggatttcttttctttttttttttttttttttgagacggagtgtctcgctctgtcgcccaggccggagtgcagtggcgcgttctcggctcactgcaagctccgcctcctgggttcacaccattctcctgcctcagcctcccgagtactgggactacaggcacctgccgccacgcccggctaattttttgtatttttagtagagacggggtttcaccgtgttagccaggatggtcttgatctcctgaccttgtgatctgcccgcctcggcctcccaaagtgctgggattacaggcgtgagccaccgcgcccggcctgagatgggatttcaacatgtgggccaggctggtctcgaactcccgacctcaggtgatctgcccacctcagcctctcaaagtgctgggattacaggctcgagccacgtggcccagccctctcctgcacttccaagggattttcgaaatgcatggacctctcaggttaattatagtgtctgtagaaccttaactgctgtaagctttccagcagactccacagacgtgttattagttgccaccctttctttactttcctcctcacccccatggatagtcgtgaccctggtggtcagagataagatgacagaagagctaaagtaaagctggtgttggcgatcagctgggaattctctaaaacagcttctcacattattcttatcctccatagaaggagtgcttgtcctacttgcaggcaaggcagtttggttccagggtagttcgaaatcttattcactgatatagtcagcaaatgtttattgagcacccaccaattgccaggcactgactcactcaaattagagcactgaacaaaatagaccccctcccccatccgtggcagacgtgtcataatgagaggaagacagtacaataaatgaacagatgaatgtatgtctggtgatgagtgtcagggttggtgtgcttagcactgaaaatgggggcttctgaggttcaaatggttgcagttcctaaagaaggttgagggccttgccttcaggtcaccgcgggagactggcccctttccactggaaacattgctttgcccagtcagtatttgagagctcagcctgcaatggagaaatcacacttctcctctttcaccctgctccccaccctgtttctcattttacccatccccagccatttgcagaatgcatgcagagcttctgtttgccatgtctggaggctacaggggaggctgaataaggggtgataagcctgtggctcatgtgaggcgggagagagcccagcaggagtcacactgaaatgactccattagccccaggaggccttggcccaccggccatgactaatgtggacattagagtgtggattccgatgtcctgcaagatcctcctcacaagtgtcatttcatggtttttttctggcaacatctttttgaaaactccctgtaaagaagtgctgatgttgatgctgaggcccaggaactttggagtttatttacctttttttgttgttttattttccttggcaggtgaagtaggagctagagtttacttattttgaagtttatttgaaatatgctttttatgattagaagccattttagaaatgagggcgaggccgggcgcggtggctcatgcctgtaaccccagcactttgggaggccgaggcaggcgggtcacgagatcaggagatcgagaccatcctggctaacacggtgaaaacccgtttctactaaaaatacaaaaaaattagcctcgcgtggtggcgggcgcctatagtcccagctatctgggaggctaaggcaggagaatggcgtgaacccaggaagtggagcttgcagtgagctgagatcatgccactgcactccagcctgggcaacagagcaagactctctcaaaaaaaaaaaaaatgttatgctaagtgagaggagccacttacaagagaccaccacatgtttggccgggtacagtggctcatgcctgtaatcccagcactttgggaggccgaggtgggtggatcacgagatcaggagttcaagaccagcctggccaagatgttgaaaccccatctctactaaaaatacaaaaaaaaattagccgggtgcagtggcaggcgcctggaggctgaggcaggagaatcgcttgaactcggagggtggaggttgcagtgagccgagatcacgccactgcagtccagcctgggagacagagtgagactccatctcagaaaaaaaagagggcaagaattcacatgttgttttactcacacgtgttggagatggagctcagggtgattcctgactgggcccagggtccatggcctcagaagtcccttaatctgaagtccttcacttttatgtgatactgctgggcacaatggctcacgcttgtaatcccagcactttggggggctgaggcaggtggattgcttgactgaggagtttcaacatggtgaaacaaaaaatacaaaaaactagtcagcctgtagtcccagctatgtgggaggctgaggtgggagaattgcttgagcccaggaagtggaggttgcagtgagccgagatcgcaccattgcactccagcctgggcgacagagcgagaccccatctcaaaacaattttatatgtgatagtttgtccatgtgtatgccagggtctgtcatttagagtgtatggcatgttcttaaaggggtgggggaacaaaaagatactataatagtttgtgaccttttgaagggccgctctacatgaatagatatatagtatgtctgtggtgttaaaattttgtggggcgattaggaaaaacatttccaaaaagtcttagggggaaggtagtaatgaaaaaaggttgagaaacaccattccagagagagggtccaagagctttcctcagttctgaaaatggtccatgatttgcacaaggtaaagaatggctgaatgcgaattaacagcagacagtttcttagaagatttgaaactattgtttccttcccagctattcagatggactgctcgggttcttgttatggattgaggcgagggtagacttaatagtcttgtttcagagtggaatatggagtgatggtaggcatgagtagtgatgagttgcattgtgctgataggttatgaaatgtaaattttttattttttgatatggagtctctgtcgcccagactctggagtgcagtggtgcgatctcggctcactgcaacctccaccttctgggttcaagcgattctcctgcctcagcctcctgagtaactgggattacaagcatgcaccaccacgcccggctcatttttttgtatttttagtagagacggggtttcaccatgttggccaggctggtgttgaactcctgacctcaggtgatccacctgcctcagcctcccagagtgctggggttacaggcgtgagccaccgtgcccggcctgaaatgtaaacttttatatctaaatattttatatagaaaataccaagattttatatctgaaacaccaagattttatgagcctcataacttaagtaggatttgtaattgtaaatgttctttcctcataaatacctgaggtttttttttgaaaggttctgaattgtctcaataatgaaaacttccagacacccaagcctagaggagatgggtagttggtagctttctgtactggaaacagaaacactcaaatatatagaacctagccagctaaccaaagtaggtagatttatagatcatcttaaaataaggctgattacacagtaaatgtcacctttggaatctggcttggtagaattgaaataggcttcagtacctcctgtcattcagtacctgttttcttgaactcctgacttcaggtgatctgcctcggcctcccagagtgctgggcttacaggcatgagccactgtgcccggcctcagtacctctttttaagatgctctcattcattccctggtgaaaagatgcttgaagtgcaagtgcaagtaggtgtggaaagcatggagggtttgtgttgcttcatttgttttggtatttgttttttccaccagtccctccctctggctttctgcctcccagcccagcatatcctgatcttgtagccatgcaggactttgacccgtgtggtggtttgccattgtcttcctccaggtgaagataagacatcattggtttggcttgaggttgtacttttggccttccctgtatatcctcttcctccttatcctctccgtcagcatgcttggttggactctgtagtgaaatgtgtcattctctttattctgactgtccctatattagtcctgtcttcataaaaaatacaatcgtaaagatacaatatctactatttgttaaaagttttgtgctaggccaggtgcggtggctcacgcctgtaatcccagcacttcaggaggccgaggcgggtggatcatttgagcccaggacttcaatactagtctgggcaacatggtgaaacctcgtttctacaaaaaatgcaaaaattaaccgggtatggtggcacacgcctatagtcccagctacttggaggctgaggtgggtgggtcactgagcacaggtcaaggctactgtgagccaagattgtaccactgtactccagcctgggtgacagggcaagtccctgtctcaaaaaaaaaaagaaagctgtgtgctaaatactattttaagcaattataatggattaaaaactcctttaatcttcacaacaatgttttttctttctttttttttgagatggagttctttgaaactcttggattaaatgactcttcagagctttctttgctttttgatactaaggagtggcatgtctggggatttttatagcaaataacttctccttggctactatccttagaattccaagtgtttttaatgaaaagaggagacttgtttttagtgatgttagttgtttttaggaaaggtgttctgcagtgtttttcgctaaggtggctcacgcctgtaatcccagcactttgggaggccgaggtaggcagatcacttgaggttaggagtttgaggccagcctggccagcacagcaaaaccctatctactgaaaatacacaaagtagccaggtgtggtagtacactcctggagtcctagctactcaggaggctgaggcaggagatgacttgaacccgggaggcagaggttgcagtgagcctagatcgcactattgcattccagcctggacgacagagtgagactgtcttaaaaaaaaaaaaaaacataaaatggagaggtagaccagcttacgggaggtgttgcacttccctctgccactggagagactctggatctgcagccagggagcttgtgaaggcttcttgtccacggaaatgagggcggcagttgtgactttctggatggtggcccagaggaagcaacactggcagagcctcttctgtgaagcagctctgcgagcaattttgtgacattgaaagagcaaaggataaaacgttgaaagctgatccagatctagaaaagtgtttggcaattgctggaaaaggtgtagaaatgatgcttgctctgtatcgtaagttatatggtgagaagaccacaagcacggttcaaactccccttagaaattcttttgcacagaaattaacactttaatcctaaatgtttccaatgttttaacttacagtatgctaaataaacattctttctgtttgtttgttttgttttgttttgttactctgtgcatttatagccaatagagtttttctttccttatttttttgacacagggtcttgctctgtcgcccaggctagagtgcagtggtgcgatctcagctcactgcaacctccgcctcctgagttcaagtgattgtcccgcctcagcctcccgagtagctgggactacaggcgcgcgccactgtgccgggctaagttttatatttttagtagagatggggtttcgccatgatagccagggtggtcttgaaatcctgaccacaggtgtgagccactgtatctggccaaaaaaatttttttattttttgtagagacagggtctcactatgttgcccaggctggtcttgaactcgtgacctcaaatgatcctcctgcctcggcctcccaaagtgctgggattataggtatgagccaccatgcccagcttgacaaaaaaatttttttttttttttgagagatgaagtttcactcttgttgcccaggctggagtgcaatggatcagctcactgcaacctgtgcctcctgggttcaaacgattctcctgcctcagcctccagaatagctgggattacaggcatgcaccaccacgcccggctaattttgtatttttagtacagacggggtttctccatattggtcaggctggtctcgaactcctgacctcaagtgatccacctgcctcggcctcccaaagtgctgggattacaggtgtgagccaccacgcccagctgacaaaaatttttaaatgtcattgagcagtatcatttttcccactgattatgagattgctttgtgtgatcacacactgacgggcaggccaattgctgcttgtattcagtatttggccccttatagaaaacatttgcagacccttgttctagaaaaaacagatgggtgggaggaggaggaggagaagcatttcaggagtggctttgggctttcctgtcctgcacgtggtgaggcaagaagctcttgtgcctcagctcatagcactcatgggagtctgtcaataactagaaccctaggagttatttttgcttgttttaaaaataagcttgttttggggccaggcgtggtggctcacgcctgtaatcccagcacttcgggaggccgaggcgggtggacttacaaggtcaggagatcgaaaccactgtggctaacatggtgaaaccctgtctctactaaaaatacaaaaatcagccgcgtgtggtggcgggcgcctgtagtcccagctactcgggaggctgaggcaggggaatggcgtgaacccaggaggcggagctttcagtgagccaagatcgcaccactgcactccagcctgggcgacagagcgagactccatctcaaaaaaacaaacaaacaaagcttattttaatggatataaaaacatgaatgaaataagacaccaagttcaaggtggtagggggttaatttggaagaggcagagcaaatgtgattgaatgaggggtatgcaaagggtttctgctctatccatatgttttatttattaatttatttttggagaacaaagtctcgctttgttgcccaggctggagtgcagtggcgtgatctcggctcactgcaacctccacctcttgggttcaagcgattctcctgcctcagcctcccgaggagctgagactacaggcacgtgctaccacacccggctaatttttgtatttttcagtagagatggggtttcaccatattggccaggctggtctcgaactcctaaccccaggtgatctgcccagcaggcctactctatgttttagtccttgagaatgttagaatttgatgacactgagatgtggatataccagacatggggtattttctgtactcatcagcatatttgaaatatttcattaaagttcttactttgcaaagtagacacagctgcaattatgcatttttggaaaatgattaggtactatctcatctgttttgtttttttgtttttttgtttttgagatgaggtctctgtcacccaggcctgagtgcagtggcgcaatctcagctcactgcatcctctgcctcccggtacaggtgatcctcctaccttagcctctcaagtagctgggactgcaggtgcacaccaccacacccggctcattttttttgtatttttgagctcaagcaatttgctcgtctcagcctcccaaagtgctgggattacagatgtgagccactggcccagtactatcttgctaagcctataaaattagattagattggtagtacttgggacccctcagaattctataatgtccttcttagaaggtgacagcagatctatccagcagactgtagattgttgtcttagtcaccggctgattgtcttggttaaagctctagtgacttcagaaccagagaaacttgttttccaacacattcaaagaccagtttgctttgcaattttgcaatagctgacattcagaatgcctgcgaggattttgtaagtgaggttcatatttcggataatgtgtgacttttgccatttctgatgcttttccaaaagaaagttactcttccctaaaggcaggaattctacttttgcttagatattctgaagcttatgagttcatccaaatttggttcctttcagcattttcctgttggtccgtctccgttttgaaaacatacagaatgtacttaattttgccctaccatttgtgagcatacaaaatagcacttgagtcatatttttcatgattgcttcccaatactattctaagaccaacatagcattttgtcatttcataataatagaattcctcattaaggaataactttctaaaaatgtgtccagcccatttcccccccagccctggccgtttcctttggtatgttggtgtccgtgaccctgtcattgagtgtgactgaaaacagaggcctggcagagggcctggcctttgtgagccctcagattgtgataaagaccctgaggaatgttttggcttttaggcaacctcagttctgttttcctgctgcctgttgatgcagtggctttttcttcccatcagtctgaagggtcgtgttagtgcctgggctctcatcagaccacagggaactcatcctggcactgctggctgcctcactttaaccacctcaagtctcagcattctcgtttgtaaagcggagatattattacgtgattcacagttttattgtgaccattagaggtagggcacatgatatgccaggcatcatgcttggcgaaggcaataagtaatgcagccaggtgctgtggctcatgcctatgatcccagcactttcagaggcggaggcagcaggatcacttgagaccagcctgggcaacatggtgagaaccccatctttacaaaaaattaaagttagccaggcgtggtggtgggtgcctgtagttccagctactcaggaggctgagatggaaggattgcttgagctcaggaggtcgaggctgcagtgagctgtgatcatgccactgtactccagcctgggtgacagagtaagactgagtctcaaaataaataaatacaaggtttttgcagaacagtgaatgagaaaatgcactgttgttatttgtggtggaagtgaatactatatggcctgtgtttcctgaaggaacactgcctccattaaaacaaatgagcaaacaaaatcccttttcatgacttcagttctctcaggcctgagagtaaagtttacatcatagatgcttaaaaacaattcagttagtgaaagcatgtgacaagatgagacgatttgtcttcaacgaggagcttccttccatactcacaaaaagatgtgtgtcttaacatagtaaggacatggttaaatttagtcttatttggacctaacttcagccaattaatctgctacttagaactcttttactcaaatgaaatttgagtaaaaaaaaaaaaaattttttttttggccaggtgcggtggctcgtgcctgtaaacccagcactttgggaacccgaggcaggtggatcacctgaggtcaggagttcgagaccagcctcaccaacattgagaaaccgcgtctctcctaaaaatacgaaattagctggtgtgatggcgcagtcctataatcccagctactcaggaggctgaggcaggagaatcacttgaacctgggaggtggaggttgcagtgagccgagatcgcaccattgcattccagcctgggcaacaagagcaaaactccatcttaaaaaaaaattattataataattttcaagtatatacaaagcagtgacacattttgtaaacccccatgcaccatcacacagcttcaacaactaccaacatctgtctttcagacatgtttttagtccaagttttctcttaataaagagactttttctttttcttttttgtttgtttgagactgagcgttgctctgtcgcccaggctggagtgcgatggcaagatcttggctcactgcaacctccgccttgcgggctcaagtgattctcctgcctcagcttcctgagtagctgggactacaggtgcccaccaccatgcccagctaatttttgtatttttagtagagatggggtttcgccatgttggccaggctggtctcgaactcctgacctcaggtgatccgcccacctcaccctcccaaagtgctgggattacaggcgtgagccaccatgcctgaccataaagacatgtttctaaattctcctgggacaacagtgaagttctacctttccttcctactttaccgaaggaacctgaaaataaggctgctttctgaaacttaaactactaagtcagtgatatttagagcagatgtaagcagctgtctagacacagaatggcttcccaggctcgcaagacttgtcatgaagcccccagcacgtcaacagaaagcatccaagctagaagaggcactggctcacagcagcaccccagaaaggaagcgtctcagggacagatcgtgaccgtgctccggaagagctgtcctcagccgctactgtgagcatttggcctgcctgacagattctgttggtgagaatgttcttaggaatcatacagtaaactaactttattctgacttcaagcatcgtgttccattgatgcttgctttccaaggtgttttgctgattcacatcagcatgcaacctgcttgacagaatacagtgatgttctcactgtaaattcatcacctgctgctgtggtctcatgtatcatcccgtgcgctgttagctgaggccagtgctcctgtgtctcctcagcacgagggcactggcaagagtgcatgtctgggcctataaagatgttggccaggttctaggcagggttgaattcaccaaggtaactgccatccatccctcaataggcattttttctcctacacaccctcaggcacatgccacgtgtacctggcacccttacttacgaagttaccgaattcctgccatgatactgtgggtcaccctgcttcattctcaggtgtggtgtcgggtggttcctgcctgggcgccgggtgttgttgggccctccctcaggttattggtttttgttttgagatgtaattcacatgccatatgattcacccatttaaggtgtacaatattcccctgaagtttattgtggaaaaaggctgtgtctgacactgcttaggaagctaagacacaaagcagccagaggggctgccagggctcactgtggcagggcggcggagaggctgctggcgcctctgtagctgttgggtgctcttgccttgatgctgttttcagctttggattgtaattgggtcccacgtgggtcctcttcatctcgtcttgttggtggcagtgttgctcccagcgttggggtgggcagagtcacacaccagaggacctcctcctgctgttttctctggaccttgttgattatgtgttttgtgacctttggcatattgtacctgttccaggtgtacagccagctggttttggttgatgtgtaatggacaaaaggtgcccctatttaaaaaaaaaattttttttctgcttgtagtcccagctactcaggaggctgaggtgggaggatcacttgagcctaggaggcaaggcttcagtgagccatggtcctgccactgcactccagcttaggtgacagaggaagaccctatctcaaaaacaattatataggccgggcgcggtggctcatacctgtaatcccaacactttgggaggctgagatgggcggatcacctgaggtcagaagttcgagaccagcctggccaacatggtgacaccccatctctactaaaaatacaaaattagccaggtgtggtggtgcatgcctgtaatcccagctacttgggaggctgaggcaggagaacagcttgaacctgggaggtggaggttgcagttagcggagatcacgcctctgcactccagcctgggcaacaagagtgaaactctgtctcaaaaaaaaaaaaattatcataaaatcactcgttttaagtatatcatccaaggattttagcaccttctacagagctgtgcagctattgccacaatccaattttagaacattttcatcatcccctaaagatccttttacccatcactccccattcccacccccagtaccaagcagccactcatctacttcctgtgtctattgatttgccttttatggacatactgtacactttcattcatatgaagtgtctagataaggtaccctctaacgggtgacttttcatggttagcttttttcaaatgatagggaatttcctgcttcagaagatgctttttctgctgtgctacttacctgtgatctattgtgtgggtgggatttccttggaggcatgtatgtgtttgtttgttttgcagagtagcaaccttttttgtccgttgattagtgttctgtggaacatctggtttcatgcccatcactgtgacatatttggggagacacaacagaagatatatccctagtgggtgaaacaaacctaacaaacatgaaaacaactagcgaggagtcaatgacaacatctaagcaagcgtttggctgtgggatgcttttattggagacatgtttatcaagcatcctgtgccaggccctgtgcaggttggaatgcccttgtgctgagcaggcagaggtgggtgaaggccagggttagggaggggtgataaccgtgatacaggagcagacatggagccacacagccaggctgttttcttttcaggtcgccttcaatccttccagtggaaaggcttattttggtgcaggtgttgcttctagcaattgtttctctctccctttcaagagagcgtaccgaccttttgcaagaagtgtttctggctggaattttataacattggcttttgtttcccttttactaaagtagggccagatttgagggtgccttgaaacccaggcccatcttggtgtgcccaaataggagctgtaacaagccgtggtgcaggggtaggacctgtgttgtctttggagccatgggctgggctgcaggcactcgagttaagaagcttccttctgaggctcttccagtaatttgagtgtcctgtggcctgcctgggcagagagtggacaggaaagatcaggaaaagcacgtgtgaggactaccgagggtgctgatagcgcctctccttcccaacttcacttctctggctctgacctttcagccctaagctccccttggccctgtgggatggggcagcatccagaagggtcttggagtcaggttttgttttgtttttttttttttaagtcatgtttccattgggcgtagtggctcgtgcctgtgatcccagcactttgggaggccgaggcaggcggattgcttgatctcaggagttgaagaccctcctgggcaacatggtgaaactccatctgtactaaaagttcagaaaaaaaaagcccagcatggtggcgcacgcctgtagttccagttgcttaggagggtgaggcaaaagaatcgtttgaacctgggaggcagaggttgcagtgagctgagatcgagtcaccacactccagcctggcgatggagtgagactctctctccaaaataaataaataaagttatgtttctacactggatgtgcatgtcttcaataatggggacaggggacaaaacacacaactgaaatacagttcagtgggtgggttgctgtctttattgttgggtgatgtgtttatacaaggaaggaagcactgagtgggcctgttgacgatctgggcttgggaaacagctcacaggggaactgctggaactcaaggctctggttctcctgggggatccatgtacaggtctgtgcgtgtcctttgttgccaggattgccctgccaagctaaccgggttgtgcttcgcgtttcagacttctgcctggtgtcgaaggtggtgggcagatgccgggcctccatgcctaggtggtggtacaatgtcactgacggatcctgccagctgtttgtgtatgggggctgtgacggaaacagcaataattacctgaccaaggaggagtgcctcaagaaatgtgccactgtcacaggtgagatggcagtagttggagcttttgtttttttccttttttttttttttttttttttttttgagacggagtcttgctctgtcgcccaggctggagtgcagtggcgcgatcttggctcactgcaagctccgcctcccgggttcacgccattctcctgcttcagcctcctgagtagctgggactacgggcacccaccatcacgcccaactaattttttgtgtttttagtagagacatggtttcaccttgttagccaggatggtctcgatctcctgatcttgtgatctgcctgcctcagcctcccaaagtgctgggattacaggcatgagccactgcgcccagcccctgctttttttttagacagggtctcactgcagcctccacctcctgggctcaagcagaacctcccacctcagcctcctgagtagttgggactacaggcacatgccaccacaccttgctcattttgaaattttttatagaggcgggggtctccctatgttacccaggctggtcttggactcttggcctcaagtgatcctcccacctgggccttccaaagggctgagattacaggcgtgagccactgtgcccagccagattttgctctttagagacaatttattaactggaatgtggatactttcctctctttattagttcttgacagtggaatctgggtgacgttttaaaaagcagaagaaacaggcaccgtgtgaatgtcctggtggccgtacagtggtttcacagcagaccctcactcctcctcttcccagaaagggagcaaaacaacagggcagagctggggccagcgtgacccagcttcctttctcccactttactaagtgcaagtttcagagcagaccaaagaggaagtagccttgccttcttgagcagaggctttttgatccactccgacagggctgcccctcttgttccctgggtatttgggttattttattttattttgagacagagtcttgctctgtcgcccaagttggagtgcagtagagcaatctcggttcactgcaacctcagcctcctgagtagctgggattccaggtgtccaccactacgcctggctaatttttgtatttttagtagagatggggtttcgctatgttggccaagctggtcttgaacttctggcctcaggtgatctgcctgccttaacctcgcaaagtgctgggattacaggtgtaagccaccgcacctggccgctatttgggttatttttaattgtgggacaagtgacttgaatagctcacccagccaagttaccgatcaagttaaaacaaacatacgtcctggaatccatcctctttgcggccctcacctgcgaggagttctgtggaatcaaggtaattttgaccctgataacctcacagtttaaattaaaacctaaacctcccagcagcgtgccctggctcttagctgagtgagaaggacttcctgagagctggtggtgatgagacattggccctttggggctgctccatcccgagtgttccagagacccgagggtttggccatccaaatcctatgttaaagattttcacttttttctttttttctcgcttagtcgcctaccaggctggagtgcagtgatgtgatcttggctcactgcaacctccacctcctgggttcaagtgattctcgtgcctcagcctctcaagtagctgggactacaggcgtgcacctccacacctggctaatttttgtgtatttggtgaagatggagtttcaccatgttacccaggctggtctcaaacgcttgagctcaagcaatctgcctgcctcccaaagtgctaggattacaggcgtgagccactgtgcccagctaaacatttcactttaactgaaaaaacaaacaattacactggcctttaagtaaaaaataaataaaaatattttcagcggcactccccctaacatgtttttttgatgacttggtgttgtctctgtgagccaccgttgacccagttactgtatttctatcgtcagctgtgattcattatgaaggaggacttgggagaactatcttttgctaccttttctgagctatcccagtcaagagttgcctttagcaaatgtatctgtccatcctggctgtttgttacctcctcaggaagggagctgaagtgttgagaactcaggcagtagacagtgaacatagccaggggacatgagtggctgtgtgttcctgggagcaggcaggttagctgtctccctagagtccggccccgccttgcaggtccagaaagcacatattggcatctgactggctgcaatgtgtgtctctcgaggcgctcccatgtgagtctgtaaagagctaaacactgccagggctgctagtgcctggggtcctttgccggcatattctctcccaggcaggcaggctctgtgggaaggcaagtgagaatgagactgccagtgtattaattcatcatgagaaccaggaccgccccggggagcaggcactcgtgtccccgggcccacgcctttagtccgcataggcaagtctctagtccagttgccagaagactgcttgatgaagagagaggcagaacgcggggagctggtttgcaaggtgaccgtttaatagcatcaggctaggccaggcccgaggatgcggaggagccagggttccctccatcttggacgaggtgtgggagataagcgctgtgtaaaatgtatcatgtgggccgggtgcggcggctcacgcctgtaatccagcactttgggaggccgaggtgggcagaccaagaggtcaggagatcgagaccatcctggctaacacggtgaaactccgtctctactcaaaatacaaaaaaaaattagccgggcctggtggcgggcgcctgtggtcccagctactccagaggctgaggcaggagaatggtgtgaacccgggaggtggagcttgcagtgagctgagatcgcgccagagcactccagcctgggcgacagagcgagactccgtttcaaaacgaaaaatttgtcatgttaacctttaaaaaaagtgtcgtgttttgttttgtttttctccccccaaagagattaggtctttttatgttgcccaagctggtctcaaactcctggcctcaagtgatgccccccacccttcacccagtgtaagcactggtattacagttgaattagttagatgagttgatacagttaagcaattatttggccctggaagtcactgtgttttgattgtttgtttctttctttgagacggagtttcactcttgttgcccaggttggagtgcaatggtcaatggtgtgatctcggctcactacaacctctgcctcccaggttcaggcgattctcctgcctcagccacccgagtagctgggattacaggcatctgccatcacgcctggctaactttttgggtttttttgtttgttttttgagacggagtctcactctgttgcccaggctgagtgcagtggtgcgatttcggctcactgcaacctccgcctcccgagttcaagcaattctcctgcctcagcctccggagtagctgggactacaggcgcgtgccaccacacccggctaattttttgtatttttagtagagatgggttttcgcagtgtcggccaggatggtctcgatccctgacctcgcgatctgcccaccctggcctcccaaagtgctgggattacaggcgtaagccaccgcacccggccctaacttttgtatttttaataggttttgccatgttggccaggctggtctcaaactcctgacctcaggtgatccacctgccttggcctcccaaagtactggaattacagccatgagccaccacacccggccaagtcactgtctttttaaggtcactttgcacatctctgctctgattccctgcaagttaatcttaagtttcctcttcgggaggcaatcttggttccttatttccaagttgtggtctggcatgcacattgaaggtcccatgtaaaggagaagtggatgctgtggtgagaggcgcacagggccagctcattctttgtccctggcagtctctcgaaagctctttcactgtgctgtttctttgtccccttgcagagaatgccacgggtgacctggccaccagcaggaatgcagcggattcctctgtcccaagtggtaggttcttaaagagacccgcgatggagtgaggccaccggatgggtcattgtgaaaggacacttgtcatttgggaactgtcacaggcttccctctcatggttctgtttactcaaaattggcaaaccgggggctctgcctgggctgccggcttctggctccagcatccttatgggggagtttatactgtccagctgacacaggggccggggatcctgcagcacttcctggctggcccccatctcctcctggaggatgggatggaggtggctgctgcccatgaggctcaggcccctccttgctgtgcgggcctccagctgctctgctgaccccactccccacccaccctcctgtctgcctgttctgtctcctctgcttcctttgctccctgttgccatcgctgtcccctgccccgtgggcatcctctgtcctctgccacccccgcctccccgccactgcagcttgtgatctcaagatgtgtgttagcttgctttgtagtgctggcggctgctgccccattcctcctttatggtttaaggactctgcatcgggcgcctggggtgagtggtcccgatgcactaccaggtagcaaatgcaccctcggggcagacctcaggccatggactctgggaggctgctgtggagggggtactgcaccgcacccctgctggaggatgggactcccccggcagctgctacccaccgagtgcactgtagctcagcagctgttgggccggctggcttgcagagtgctggggcgttagggtggtcactttccagctttgctaggcctggagtcctgtgcctgtcctggctttgctctgcctggctccctgtttatcctctgctagcccccccacacaccagctctggtttccatcttgttggagaggaacatgtccccctcactgtattagaaagtgtgaacaagaccgtgttccctataatattaggagctgtggcaggcttggtttctataggaaccctgaggtggcggcagggccaccacatccagcactctcagtgtgtgcgtagagcccattagggctggggtgacgtggcagagccggccatggaaggggctacacaccccttcttaaaggcgtgtccacactcctcagtgggcccttccagacccagacccagctaggcctgtgtcctgtgtccggcccagcctccctaacacagatgtttgtgtttcagctcccagaaggcaggattctgaagaccactccagcgatatgttcaactatgaaggtaaaactccaaagaggccaggtgcggtggctcacacctgtaatcccagcgctttgggaggctgaggtgggcggatcacgaggtcaggatatcaagaccatcctaacatggtgaaaccctgtctctactaaaaatacgaaaaattagctggacgtagtggcatgcacctgtagtcccagctactcaggagactgaggcaggagaattgctcaaagcctgggaggcggagggtgcaatgagccaagattgcgccactgcactccagcctgggcaacagagtgagactctgtctcaaaaaaaaaaaaaaaaaaaaaaaaaaaaactccgaagaaacttatatatggggcaaaacatgtattcttagttgggtattgagagacacttgcggattttcactgaggaagttgtagagcagggctctcccctccccaggtggtggcagccccctgaggttggggtcaaggtgacaggccccacgtggatgccgccagcagtgggaaggaggctgcgcctgtggagatgtgcgttagaggcgtagcctggcacgtggctctgcaatttacattgtccctgaacctctcgccagcggcttggctgtgggcaagtgactgttgccccgcctcagagttcccatgtataaaatgaagggtcccagataggtctcatagagactcagccactgcatgtaaaaggcctagaacagggcttggcagagagcagccttcaaagctccgaagccgtcacctggacccaaggagcagcgcgtcagagccgctgcactggtcttgggtgtaatttacaggcttctttaccagagagatgtttctccgtctgctggagccgcaagcctcctcaggcactttctggcttgcttcccctccttgcgggccctactaatttgtattccctgggctgtcttactcctagaatactgcaccgccaacgcagtcactgggccttgccgtgcatccttcccacgctggtactttgacgtggagaggaactcctgcaataacttcatctatggaggctgccggggcaataagaacagctaccgctctgaggaggcctgcatgctccgctgcttccgtaagtctgcagcccctcagcccaggaagccctgcccttgaggaccccggtccatctccccatccctaaaatatgaaggccttggaaatgctgttcttgggcccaccagggcagcaaggcctctaagccccagaaaagctggaagaaagcccctcagaaagagctccccatggaggccctggctgaggggatcccctgcggcagctctgtggaatgggggctgtgagctgacctcaggctgtgtgttctcttccaggccagcaggagaatcctcccctgccccttggctcaaagggtaagtggccccttaccctcctcctgccatcagcctgcctcctcccttccttgactgagctcagccctgcccagctgtggtttacattatccttcactgtgaacatcatcttggcagaaagtcatgtttctgcgtgagaatggcgaggtggtggtttgtcccaccgttcagtgtacacagttggggctggagtgagtcagtcacaaggcaggccctgcccaggcggcgtgggtgactggggatgaggtcttcctgttgagcatttgaggactgctgcacacgggcctgaggctggcctgaggtgtggagggagcgctgctatgtggggcataagagttggtcacgggtgacaggacggaggaccacgggccagggtgtttcccaacacagtctggtctgagcgggaggccaggcctctggcctgtgtttctgagcttgagttgcaggtgataatgttggcacaaaagacctgccatgccagtctggcctctttctccacctgtttcccggtgaaggagccaggacctggcctgcgagtctgtcctgttctagcagtgaagcctggtttgccaggcacggggctgggaagcaagcagtctgggtctggagggtggccccaaaaaggccaactctgcagctccacagccacatgggggaggctgccacaggtcacactccttagccggatcccctcctgaagaaaagcatctgagctgaccagcgagactgcagtggggcagacactattaaatttgctggcacagctctgagtaccccctcgcttccaccctgacttcatcccgcagtagctctcagccctcccagcccctgcagggccacgtctttctctattgccggtcagcgtgtgtgtgcacaaagcccctaaggtttcatgtgtacacaccggtgctaagtgttttttacacccttgtgcatctctcggcctggggctcctgtgcaggttgccctgagagttgggtttttagttcaaaaagaaggaacacagatgactactctgctggcgacacggccactctgctggcacgcacatagcatggcgcctccttttttgggggactctccttggtggcatctctggcaggctgtgtcctctccagctgcagttctggaccctgtctgggttggggaggggcatttggtcctcaggctgagcccacctggattccccaggcccttggtgagcgccactctggctgcaactccccttgcctggcccgtcctgaggcccctctctcgtcctcagtggtggttctggcggggctgttcgtgatggtgttgatcctcttcctgggagcctccatggtctacctgatccgggtggcacggaggaaccaggagcgtgccctgcgcaccgtctggagctccggagatgacaaggagcagctggtgaagaacacatatgtcctgtgaccgccctgtcgccaagaggactggggaagggaggggagactatgtgtgagctttttttaaatagagggattgactcggatttgagtgatcattagggctgaggtctgtttctctgggaggtaggacggctgcttcctggtctggcagggatgggtttgctttggaaatcctctaggaggctcctcctcgcatggcctgcagtctggcagcagccccgagttgtttcctcgctgatcgatttctttcctccaggtagagttttctttgcttatgttgaattccattgcctcttttctcatcacagaagtgatgttggaatcgtttcttttgtttgtctgatttatggtttttttaagtataaacaaaagttttttattagcattctgaaagaaggaaagtaaaatgtacaagtttaataaaaaggggccttcccctttagaataaatttcagcatgtgctttctttatgggagtcctaatttcaaccctaccaaaatgatcacaagacactatctgaggtgtcccattctagaaatagacccctcaaaatagcgtctttcagatctttttgaatgaatccacaagatgaaataaatgtcctattactgagtgcccgtgaactttcgccaaaccacacttagcctcaccacctgtgaacactgatattttattactctatttcactttttaaaacttctggctacaaccctctgaactgatcttgatgtcccactatagactgtagcccacaccttgaagcactgccctcgagggcgcaggaggggcgcatgctgtccagggaggaccaagaccttccggggttggaggggcttaaccgagtccttgtggcgtccatgacgcttctcctctcgtggttctgtgctctctgcatcttgaaggggtggtgggagggcgctctaggtcaggccttgcaccgcctgccctgggcttttctgtcaagtctccaacacacccctgtgtgggaacggggacagagaactgcccggctgaatttggccttcaggcccaatcctgctgcctcctgtgggtgttcctttcctgacactagactctagaagcccctttcctccctcctctattccaacaaggaggtcctggggtacaggcatctgggcgccccatgaggtccggcaagcagctggactctacctgcctcagagacacaggaggagtggccaggtgcagtgccacaggccagactgctttcgactgcttggaaccaaagaacttccatgtctttcccttggcccttcctagaaatcccttagggcttaaaactctcttccagaagcaagttgggcaaatagctcatctgctcctgccccgcctccctcacagcagatgccgcaaagggatcctggtgtcctcccagctgatccccgcatgcctcagcccactctccagtggtcattgcagctggctcggggttggtgaacaagtggaatctacttaccacgtcccagacaaatcagacacacaggggtctgggcgagcctgtggtccagggaaagagggcctgggagttgggcagagcctctccacctgcagcgctctgtgtgtggcagtgggcgcggcccctaacccctgcaagcctgcagagtctgcacatgcacctctgcccagcaggagtctttctccaccaactccaatatggactgtctcctatctcagtcatgttgaaaaaaaaaaaattgtgcctttggacttttttaaaaacttgagaattggccgggcacagtggctcatgcctgtaatcccagcactttgggaggctgaggtgggcggatcacctgaggtcaggagttccagaccagcctggccaacatggtgaaaccccctctctactaaaaatacaaaaaattagccgggcgtggtggcgggtgcctgtaatcccagctactcgggaggctgaggcaggagaatcgcttgaacctgggaggcagaggttgcagtgagccgagatcacgccattgcactccagcctgggtgacagagcgagactcctttcaaaacaaaaaagcaacaaaaaaacttgagaatcacttaattctaccataataggaagttagatgaagggaattctctgaagcccagttgagcttctgtaggtttctaatacaatgagcctttatatgtttctagtgcagaagctgctgctctgtgacccacttctcctgcctaaacctgccccttctcacggcaagggaggcctcagcccctccgctcctggcagctcaactccatccgggcctctggactctttccagggcgactggtgggcctcaccacagcagacactcttcaggctgctgccgccgtggcccttgaagctcagctgtgtcatgtgttcaattcttggggcattttacggcctgacaaaggccctctttttgttggaaaggccacccaacagtgggtcagtggcctcggcattcagtggccacttcacatctctgtctccctcgggttgctggcaccattgagaggtggaatgggctttataaaaaatcaactcattgctggtccaagtgcagtagtgtaacaagtaattgatcacaaccagttacagagttctttgttccttctgctgctttccttgaccagcctgaaaaaaaatcagctcaccgaaaatcagctcagagcttctcactatctcttcccctggtccacaagcttgaggaaggcagacagtgtggctgtccctagaaagggttcccctgggccatctcctgggtaaagatcaggacaaagggctcggcggttatacagacccataaacattaggggccggtgcagtggctcatgcctctaatcccagcactttgggaggctgaggcaggtttatcacttgaatccggaagttcgaggctagcctgggcaacgtggcaaaaccccatctctacaaaaaaacaaaaattagccaggcgtggtgatgcatggctgtgctcccagctacccaggaggctgaggtgggaggatcgctagagcccaggagatcgaggctgcagtgagacacgattgcaccactgcactccagccagggcaacagagcacgaccctgtctcaaaaaaaatacaaattgggcacagtggctcacacctgtaatcccagcactttgggaggctgaggtgggccaatcacttgaggtcaggagttagagaccagctcggccaacatggttgaaaccccatctctactaaaaatacaaaaatgagccaggcgtggtggcacacgcctatagtcccagctacttgggaggctgaggtagaactgctggaacccaggaggcagaggttgcagtgggccgagatcgcgccattacactccagcctgggtgacagagcgagactctgtctcaaaaaaataaataaaaaacaggccgggcgcagtggctcgcacctgtagtcccagcactttgggaggccgaggcgggtggatcacaaggtcaggagatcgagaccatcctggctaacacggtgaaatcctgtctctactaaaaatacaaaaaattagccgggtgtggtggcgggcgcctgtggtcccagctactccggaggctgaggcaggagaatggtgtgaacccgggaggcagagcttgcagtgagccgagatcgcaccactgcattccagcctgggtgacagagcgagactccgtctcaagataaataaataacaaataaataaaaattaggaattctacccttatcattcctgggtatgtgtgcctcttttcttcccacaacatcaagcccaggcctgcctgatgggtgcagcctccagggggcaggcccaccggaacaggacctatggggcttggccttagttcaggttctgcccttgggactctcctggactcgcttgtcctaggtcccaaagacagtggccacttggtcgagtgtcctttttgccaagtctccctacttggcacatcagacaacgtgagggaaatcataagtctctaaatttgtaaaaatgcccatgttccattcacatcggactcttccaaaaacaagtctgggtgtgagtagatgttgaaagaagaagtgaagcggtacttccggggtgggatacagactgatttcatgtccttggagggagaccaacaacctggcacctgaggagggaacaccttagaccccaggaggtggggggagaggggtggggagggtgcaatcagtcctccctctggcctccagacccagcaccgctgcttggccagactgtcacctgatcctcccaagtccagcagcatctgcagctgctattctgacccactataaaaacacacctgtaagctgggcgcagtggctcatgcttgtaatcccagcattttgggaagcccagcactttgggaagccaaggcgggcagatcacttgaagtcaggagttccagaccagcctggccaacatagtgaaaccccatctctactaaaaatacaaaaattagctgggcgtggtggtgcatgcctgttgtcccagctactcgggaggtggaggcacgacaattgcttgaacctgggaggcagaggttgcagcaagcggagattgtaccactggcaccccagcctgggcgacagagtgggactctgtctcaaaaaaaaaaaaaagaaaaaccccacacttgtagacatggccagtctagagccattctgcacctgaagccatcaatggcagctcctgaatgtggggccccctcccccaacacacaagatgtttctaaacgtagggacaggcccagccttgttccagtctggctggtacaaaatcataggcttctgatgcccaaggagctctgagctctaccccacgtagtcattgagcctgcagctcagtagcactgcccatggggcttaaccaaaccaatgctgtggtgttccaagtgacgtttcccaattcctgcctgggcacagtactcacgcctgtaatcccagcactttgggaggctgagatggaaaaatcgtttgagcctgggaggtcaaggctgcagtgaaccatgctcacaatgctaccactgcactccagcctgggcaacagagcaaaacaagaccccatctctaaaaacaaaaacagaaaaattcctgagctgggcaccctggacccctcaggttgtgtgtttgcatgtgggaaggtggcccacagaatgtctctcctctggggaggaggttgttttttgggtttgtaatgacaggcaatgacaccaaagatcagatcagacttgactcccttgtgtgaatcctagtgaagtgctcccaaacctttctggcaccaaggactggttttgtggaagacagtttttccacagaccagggtggtggggggtagggggtggtttcatgatgaaacttctacctcagatcatcaggcattagattctcataaggaagctgggtgcattggctcacacctgtaatcccagcactttgggaggctgaggtgggtggatcacttgaggtcaggagttggagaccagcccggccaacatggcgaaaccctgtctctaccaaaaatacaaaaattagttgggtgtggtgatgcacacctgtaatcccagctactcgggaggctgaggcatgagaatcacttgaacccaggaggcggaggttgcagtaagcagagatcataccactgtactccagcctgggcaacagagtgagactgtgtctcaaaaaaaaaaaaagattctcataaggagcatacaacctagatccttcgcatgcacagttcactatagggtttgcactcctatgagaatctgatgctgctgctgatctgacaggaggcggagctcaggcagtgatggtcactcgcctcctgtgcatctgggttcctaacaggctggggaccggtactggtctgtggcctgggggtttggggacccctgtcctagtgaataggagactgtgtctgggatgtctgaagtaagacctggtggtcccctcgcccctggaacctggcggcatggttgaggttaatgctgcagattggagtccagttgatcatagatgcttaatgagatgctgtatgaaacaacacatttggccccagcctctgttggtcagattcatcagagtggaagcagaatgacacattcattcaatttatcagcagctaaggtggtagaggggagtctctcattcctacaggtcttgctgaatgtaccaggaatgcatgaccctgatagctctctcccttggttttattttttttttctttctttctttcgagacagagtttcactgtgtcacctaggctggactacagtggcacaatctgagctcactgcaacctctgcctcccaggttcaagtgattctcttgcctcagcctcctaagtagctgggattataagggacacaccaccaggctcggctaatttttgtatttttagtagagatggggtttcgccacgttggccaaactggtctcaaactcctgacctcaagtgattgacctgcctcggcctcccaaagtgctgggattacaggcgtgagccaccacgcctggcctcccttggtcatttcttacggttgtgtttgcagcaagcacgttgaggggtgagggcaggctgcgtatagccaggcaggtccccaagcttagcatgcctctttcgtaacaacccactccctgtgcaggtgtccatctgggtccccggctctgcctctacagcccaggggaatcccacacatggtggcgtctgtgctgcttcgtgcgagcaggaaagcctttgtctctgaccctggagtctcgagacttctcccagcatttttgaaacagtaagaggctcacatactagcctgttaagtggaatcatatcaaatcccagacccagcagtcagctgggtggaggccaagcctgggcctttccagctgggttgtcagccccttggcacttcccacggacggtccgtcgagatttcctgacgatcaggatcccagaacatcaaggaccagagcaagactgactgtggtcagaggttccagtccagagctttcgtcttctgggaaaggaaactgggtccctgcatactgtgtgcttaaggtcatctgtctcccaagatgtggttgatttcaaagaaaacattcaggaacagggattatggtgtttacagaaccaaggcactatattcctgtgagcttcaggaaagaaaccaaaccagccttgctgcagccgcttttccagtccacccatcagcccttgggcatgcaggagtgtgagacctgccgggagggctagacagtgcccttcttggtcccacaccgtcttgccttcccaacgcagttaaattgacatccagaaatcttcctaaattgcagagattaagtaaaagctttcagggttagagtgtccctcggaaggatggctgctggtgaaatgttagagaaggggtaagctgacctagcagtggatgacatcaatactgctgccagctgggagcacaggtccctttttcctacaggggagaaggcactgtttataccctcaaggcattttaggcagagatcatcagggaataaacaggaaagggcaggctgggtgcagtggctcatgcctgtaaccccagcattttgggaggccaaggaggatcagttgagcccaagaattcaagaccagcctaggcaacatagtgagaccccatctcaaaaaatatatatatattttttgagatggggtctcaccctgtcgcccagactggagtgcagtggcgcaatcttggctcactacaacctccacctcccaggctcaagcgattctcctgcctcaacctcccaagtaactggattacaggcgccaagtaactggattacaggcgcccaccactacggcctggctaatgtttgtatttttagtagagacggggtttcatcatgttggtcaggctggtctcaaactcctgacctcaggtgatccacccgcctcagcctcccaaagtgctgggattacaagtgtgagccactgcgcccagcccccaaaaaattttttgtatgagccaagcatagtggtgcatggctgtagtcccagctactcaggaggctgaggtaggaggatcccttgagcccaggaggttgaggctacagtgagctatgatcataccactgcactccagcctgggtgacagagcaagaccctgcctcaaaaaaaaaaaaaaaaaaaagttactgggtgcggtggctcatgcctgtaatcccaggactttgggaggccagggtgggcagatcacgaggtcaggacatcgagaccatcctggctaacacagtgaaaccccgtctctactaaaaatacaaaaaattagctgggtgtggtggcgtgtgcctgtaatctcagctactcgggaggctgaggcaggagaatcgcttgaaccagggagttggaggttgcattgcagtgagccgagatcaggccactgcactctagcccggtgacagagcaagactccgtctcaaaaaaaaaaaaaaaaaaaatagaagaagaaaacaaaaactaacattgattgagcatcagtttaacttgtgccaggcaggttctgtgcaaaaccatttcctagatgagataagttttcctttttacagacgaggaagcagtagtccagagtggctagctgatttgtccacaaagcagtaagcggtagagcgactgacctccaggacccaaacttgcagcccctctgtgccggtggtgactcacccttagcacagtacctggcagcaggcgatgccacctgttcactaaggcatggcgagcagcacctctgagtcacaccattctgggtggtgcacaaagcagatgagttctcaccctcatggaatgcgcactctgcctcgagagacggacactttctctcatatcctgcgtccagttgcaggcaaagccacaatcattgctcacctcccagtcacactcagggtaaagagcaaaggtctttgatttacaagtccacacccgccacccgcctctcctcccctctccctcatctgcctctctccttctgctctctctgccactctgacctcagcgcagctcctcagacacaggcacattcctgcctcaggggcctttgcatttgctcttccctcttcctctatatgcttgcatcgcttgcctgcttgtcttcaggtctttttttttttttttttttttgagtctcgccctgttgcccaggctggagtgcaatggcacaatcttggctcactgcaacctccgcctcccgggttcaaatgattgtcctgcctcagcttcccgagtagctgggattataggcacccaccaccatgcccagctaatttttgtatttttagtagagagggggtttcaccatgttggccaggctggtctcgaactcttgaccgcctgcctcggcctcccaaagtgctgagattacaggcatgagccactgcaccaggcctgtcttcaggtcttttttattttattatttatttatttatttatttatttatttatttattttgagacagagtctcgctctgtcgcccaggctggagtgccgtggtgcgatctcggctcactgcaagctccacctcccgggttcacgccattctcctgtctcagcctcccgagtagctgggattacaggcgcctgccaccatgcccagctaatttttttgtatttttagtagagatggggtttcactaagttggccaggatggtctcgatttcctgacctcgtgatctgcctgcctcggcctcccaaagtgctgggattacaggcatgagccactgcacccggcccacatactacattttctatccactcaccagttgatgaagacttaatttgtttccagttttcttttttcttttttttgagatgggatctccctgtattgcccaggttggtcttgaactcctgggctcaagtgatcctcccacctaagcctcccaaagtgctgggatttgtttccggtttttttcctactatgctatacttttgactttgtttccctgactaggatgtcaattccgtgaggctggatttttgctgatttttttttttaacctctgtacccctagctttttttttttttttttttttttttgagatggattcttgctctgtcgcccaggctggagtgcagcagtgtgatcttggctcactgcaacctccaccccccgggttcaagcaattctcctgcctcagcctcccaagtagctgggattacaggcgtacgccaccatgcctggctaatttttgtattttttttagtagagacggggtttgaccatgttggctaggctggtctcaaactcctaacctcaggtgatccgcctgcctcagcctcccaaagtgctgggaattacaggtgtgagccactgtgctcagcctgtgtgttttgagacagggtcttgcttcgtcacccaggctggagtgcagtggctcaatcacagcttactgcagcctggacttcccaggctcaagtgatcctcccgcctcagcctctcaagtagctggaactacaggcgagtgccaccatgcctggctaagttttaattttatgtagagatggtctcagtatgttgcccaggctgatttcaaactcttgggcccaagtgatcctcctgccttgcttccctcccaaagtgctaggattacaggcatgaaccacttcacctggcccatgctatatgtttgcccctcgtcttcttacctactccctcagttttctcatctgtgaagcaggggttggaacagtaggggttgaatgtttgtgtcttccccaaactcctgtgctgaagctgagtgatggtatttggaggtaggacctctgggaggtcatcaggtgatgtgggtggagcccttattaatgggatttgtgcccttatagaaagggacacaacatgagatgatcttgctctgggccatgccgggaggaagggagaaggtggctgtcaacgagccaggaagcggcactcctgacactggatctaccaacacccctatctcagacttccagcctccaggaccgtgagaactgtttcctgttgaagccaccctctctatatttgttacagcagcccacactgattaagacactttttttttttttttttttttttttttttttgagatggagcctcgctccatcacccaggctggagtgcaatggcgcaatctcggctcactgcaacctctgcctcccgggttcaagtgattatcctgggtcagcctcccaagtagctgggattgcaggcacctgccaccatggctggctaaattttgtatttttagtagagacagggtttcaccatgttggccaggctggtctccaactcctgacctcaggtgatccacctgcctcggcctcccaaagtgctgggcgtgagccaccatgcccggcctgacacttatcttttatatctatatatttttttctttgttgagacggagtctcactgtgtcgcccaggctggagtgcagtggtgtgatcttggctcaccgaaacctctgcctcccaggttcaagtgattctcgtgcctcagcctccggagcagctgggattacaggcgtgagccaccatgactggcctaaaacacctaccttttattttttaaaaaaccaacacattatcagtacttcatgccagacaccattctaggaaattaactcctctgactttcacatcaatcccatgggtagctgttatttacagatgaggaaactgaggcacagaggtaaaacaactttgctgaggtcaccttgctgctaagtgacacagctggcatctagtgcagcaggctggctccaagtctatgcccctcacccctcagacgctgctcaccaagccggaggggctgtgggagcgagttagaacacgggacgcccctggcagcagcgccctgcgtgttaaagcgccgcggaggaagctgtattgtcgcggtacgcaggaaggcaggggcagcacctccctcttcaagaacgagcatctgagcttttgggggaaacctgtagctccccgaatgccatccacagagcccccctcagtcggcctcccctgaggcaccaaggctggcggaagcagtcacctgtccatctcccccacttctcacagaggaaatcctgggtggtgccgggcaatgagtcagggctgaggaccaggacagaggttgggtggggcgtctcagcattcctccaacgggcaggtctcagcgctcctccccctgctccgctcctctgcagggcccaggcgcccttggccttaggacccaacttctcttaccgccatggagttcgacctgggagcaggtgagctcctggggagtgtggactggaggtgcagggggccggactcaagcccagaagctgcctgcaccaaccacccaacttctctccacagccctggagcccacctcccagaagcccggtgtgggggcgggccacgggggagatcccaagctcagtccccacaaagttcagggccggtcggaggcaggggcaggtccgggtccaaaggtaagtcgcctcatcaccggctgcggaggggcgggaaggctggggttgcccctgaccccagggtcctgccttaggcctccaacttcagggggctgggtaaggggcgccgcctcactgccgcacctccatccagcaaggacaccacagctcttccgactccagcagcagctccagcgattcggacacggatgtgaaggtaaggggctctcgccagcgtccccaagcacgtgccctgcaccccagagaggcgtccccgcactggggctggcggggagggtgcggggagtggtccccctgtctcgcttccagcccagaaccatctcttctctcccatccctgccctcggccccacagtcccacgctgctggctccaagcagcacgagagcatcccgggcaaggccaagaagcccaaagtgaagaagaaggagaagggcaagaaggagaagggcaagaagaaggaggctccccactgaagggccctggacagggctcattaaaccttcctctctgccttctgcgactggtcagcgtggtgcctactctggcccgtccccagctccctgccccctgcccagcgctgggcccgcccattcgtgcgcgaggccaaggagaggctgtccacgccatgcccatcagggtttattgtttctgtaacagcggccacgccctggggcggtggcctgtgcagctggagatctctcagcaccttgggttgggggcggggctgggcgggacatgggatggaggcggtgcctgtggccagacagggtggaccttggggcctgcaggcaggagatgagttcggcggccacagtggcccccagcagcagcagcagcagcgggaggttcagcgggcgcgctcaccgcaccaggtggaaggtgagccagtacatgagcataggctgcgccgccgccaccgccatggtcaggtacatgcgcagctggttccgggccccacgcaccgggaccccctcagctgctgcgtctgccaagatcttcagccgcagcgtccggatctgggtgggaaagagagagaggaaccaagggatttacccttgagccctctgggccagagtgagagcccggacatacttccagcctctgcctagaagccccaggcagctggggacaagtccctggccctctgcagcctcaggtttctgctcccggggcctcagtttccccaaacctcctaacatggtgaggatttgcttctccccgggccctgtgggcaaaatctgagaaggttccatactcaaatgccaggcaaggtcttggagcgggtgaagggggacttcccggtggacacccggcctgagggggtgggagacgtggcccaggatgctgcccccccttatgctggccacacggcaatttctgaagacacgccagaaatgctatctttatttttattaaaggacagggtctctggcctggtgcgttggctcacgcctgtaatcccagcactttgggaagccaaggcgggcggatcacgaggtcaggagattgagaccatcctggccaacacgatgaaaccccgtctctactaaaaatacaaaaattagctgggcgtggtggtgagtgcctgtagtccctgctactcaggaggctgaggcaggagacttgctcctgaacccaagaggcggaggttgcagtgagccaagatcccgccactgcactccagcttcccgacagagcgagactctgtctcacaaaaaaaaaaaaaaaaaaaaaaaaaaagtcagggtctcaccctgtccgccaggcttgactgcagtggcgtgacctcagcttactgcagcctcaacctcccagactcaagtgatcctcccacctcagcctcctgagtagctgggactacaggtgcacactgctatgcctggctaatttttatatttttttagagatggggtcttgctatgttgtccaggctggtatcaagctcctggcctccagtgatcctcctgcctcagcctgccaaagtgctgggatcacagatgtgagtcacgtgcttggcctaaacttttaaatgatgagacttaagtcaaagtttatccaaggctctgccctggcccaccagccaccacagtctgccctctgcttctcacatgctcacagtgaatcctcccagcaccttgaggtgcaagtatcatcatcctattttacaaaaggggaaactgagtttattttttatttttatttttttttgagacggagtctcgctctgtcacccaggctggagcgcaggtgtgcgatctcggctcactgcaacctccacctcctgggttcaagcgattctcctgcctcagcctcctgagtagctgggactacaggcacacaccaccacacccagctaattttttgtatttttagtagagatggggtttcaccgtgttagccaggatggtcttgatctcctgacctcgtgatccgaccgcctcggcctcccaaagtgctgggattacaagcatgagccaccgcgcccggcaaaaggggaaactgaatttaaagaaaggaagtgatttgcccaggatccaactaagcttggggtccacccagcctgcagaccccagtgctcttcaccagcacccctgactccagtgggaagggctctagagaatctccttccagggaaattctggcaggaaggctcccatgtaaggagagtggaatgagagtgagagcccagcctggagcctgtgtgctggggatccccagcctctagcagcctggctggtgtctcctcttccagggctcaggataccccctcttccaggaagccctcctgaccccccaggccgggcagccactccagggctcctcagttcagcaatgtgtctctggtctgaaccccacacctgacatcctctgcttggatgcctggatgcctccggggcacctgtgcctcagcctcaccagccccgagcccagctcaccatgaacacaaagatggctacgcagcaccagcccagcaccaggtagtagccaatcttcccgaagagcaggcccatgaggaccccgccaatcatcctgggggagggagaggaggctgtgtgaggacaaggcccaagggctggggctggcgtgaagggcgggggtactcacccgacatatttgtagcccaagaaggccaccaggtcgatggtggtgaggtcggtgttgacagtgaccagatagaggctgagcaggatggccagcacctccagggtcagccaggccagggctgagctcgcttgcagccccaggaggtctggggagaacctgcaggcacaaagccccgccacttggttggctggttcagaccccccacccccagcacccatctggggacagctctgtgttgggtagggctggacacctggcagtgaccaagatggatgtgcgcgctatcctattcccacggaaatcccatccagagaggatggcagacccatccctagacagtgacacccagagcaggcagggctggagtcacagggggctgtgctgacagtcaggagacaggtgtcagagagggcttcccaggagaggggacaccgagctgaagcctgcaggaaggagctggtcagggacaaagcccttggcctctgccacatccccagggcctcaccagttagttaatgacagatgtgttcagtgccataaaggaaaagaacagggcgatgtgagcaagaggaggggcctgatctagcctggggggcaggaaggcttcccggaggaggtgatactggaatggagccagcagggatgtgcaggtactcggcagtagtggaggggaacacgctcctgggcagaggggagttgatgtgacaaggccccaggagacagtgccagccctcccaaggaaaggaatagaccggagcgtgcagcgggaggggcagtgccaggctgaggagctggggcttgattgggagccatggatagcagggcggggcagggtgggccaggcccgcacctcagacaggaccatcctggctgctgctggagtaggggtgcagtggggagctggtgatgacagagggaggatgaggatgggtctggtagtagaggccaagaggaagggtggatggagaagggtcacccagcacaggggatggtgacgcaatgcatgtgggtaggaaggacagggaagaggcgagggtgatgctgacagtgaccctgagggctgtatcttgggccaactgggagcaaagtggggctgtcctgaaaggggaactgagaccttggaactgagaccttcctgaccaaccatgggcctcccaaaccccaccttattcggcctgccccaggcctcccttacctatcctgggtccccagcgcaagaccagccaccaaaacgtaggtgatgaaagccattgctgtgggagacagacacacagacactggtcaccagaggaagaactgccctgggcctccaggcacccacacacccgctccatataggcccggaagagagaggagggtgcagggtagggggagggtgaaacctggaatgtagaggtccggggcattgacgtcaaagcggggggccaccggggtgtcctgttggtactgcacttcccagtcctgcggggatggggagacgggcaggaccctcagagccaggcccctcccaccctgctacaggccctcctccctcgaggcgaatctcccggctccaccatgcacctgcccccacccctgagccccccacaggcccactgcagacccacattcccctgggggtgctgacctggtgtaggtaggggaagaacagcaggcccagctttctgcccacatacatggtgtccacagcaaagtaatacttgagcttggtgatggggatgaagcggtcgatctggggaggcagagctcaagtctgaagccctgtggccccgtgcatccccccactcccaccagccccgcccactcacgttcttatccaccagctccttgccctgcgcggccaggctgctcccataggccatggccatgttggacaccgggtcagccaggaaggctgcatggggcgtgggagaggctgcaggataactcaggccaccaggtgcccgctgggccccatagccccggctctgggctgaacttgtgtcatcgaaaagctggtgggggtcggccatgcccggctgggacacagggatcctccgcttcgaggctgcaagggaagagagtgagaaggagctggggacccaggataggtaagggagacctggcgaacctcattcatcccacagctctgcctcctgctgcagaggagggtggtgtcaccattagagacactggctttgatgtcagatggactggcaggtgcaagctctgccattcatccaccaacccacccatctagccaactatccatccactgatacattcatctatgcatccattcatctacccacccatccatccacctatccatctacccaccctcccactcacccacccatccatccatctatccatctaaccatccatccatccatccattcatccatccatccatccagccatccatccacccacccatctagccaactatccatccactgatgcattcatctgtccatccattcatccatccacccatccatccatccaccctcccacccatcaatccatccattcatccatccacccacccatctatccatctatccatctacccacccacccatcaatccatccattcatccatccacccatccatccatccatccatccacctatccaaccatccatccatccaccacccatctagccaactatccatctaatgatgcatccacccacccacccacccatccatccatccacctacccattcatccatccacccacccacccatccatccacccatccacccacctatctagccaactatccatccactgatgcatttatctttccatctatccatccatccatccactcaccaagctatctatccatccaccaactcattcatctatccacccatctatcatccatccatccatcatcatccatccatctaaccatccattcacccacccacccatccacttatcatccatccatccagatatcaatgatgatgattatctcaaaagctactatgtgcgagaggaagggggggctattgggcacaaaatcctgtaccaagccttttacacaaggccgctgtccatatctcctatgctccccctcaatgacttggctccagccacctgcgcctcccaatgctcactgaatgcaccaggaaggtgcctgcctcaaggccgctgcaccagctgtgcctctgcttggaacgctcttcccccaacatcctcagagctccctcctctcctcctcaagggctttgttcagtgaggccttccccagccatcctgtctacaaccgtacctcccttggtggcactccccaccccctgccctgcttcactgatatccatagaactcggcactagctgacatgctggctgtcttattttgttcactgtctcccccactcaactgtgagtcccccaaggtggggatcttgatctcgttcacagctgagtccccagccccttgcacagggttagagtaggcacttgataaaaacctgatcaatgaataaaggcagcctgggcaacatggcgagaccccatctctacaaaatatagaaagattagctaggtgtggtggttcacgcctatggtcccagctactcgggaggccaaggtgggaggatcgcttcagcctgggagacaaaggttgcagtgagccgagactgcaccactgcactccagcctgggcaacacagtgagaccctgtctcaaaaaaaaaaaacaaaaaacaaaaaacagaataaatgaccactcccaatttacaggtgtggaaaccaaggcccagacagctaaaatgacttgtgcaaagggccaaactgagtgagtggcagagcaggagtccagccctgctgtgcctgataaatattacaataatcctgtggatgaactcatctcatcttcacaaccaccctgtttctgccagctgccaatgctatcatcatccccattttacatatgagaaaagcaagccctaaagaggctcaggcctttgcccaaagtcatagtatgagagccaggtttcaaaagtttttaaaaggtccctgtggcctcacgtggggaacagatgaggggtgggcagggaagggagagaggctgctggggtgatccaggtgggagaccatggcagacaggactgggggtgtaaaagaggaatgggttatttctggatcagtttcagagctaggagggacaggacttgctgaggggtgctcagaggaggtgtgttaagaagtgggaagaggccaggcgcagtggcttacgcctgtaatcccagcattttgggaggccaaggcaggtggatcaccaggtcagaaattcaagaccagcctggccaacatggtgaaaccccatctctactaaaaatacaaaaatgagctgggcatggtggtgcgtgcctgtaatcccagctactccggaggctgaggcaggagaattgcttgaaccgggaccggggaggtggaggttgcagtgagccaagatcgcgccactgcactccagcctgggctacagagcgagactccatctcaaaaaaacaaaacaaaacaaaacaaaaaacgtggtaagaggctgggcatggtgtctcacgtctataatcccagcactttgcgaggctgagacaggcagatcacctgaactcagttcaagaccagcctggccaacatagtgaaaccccatctctacaaaatataaaatagcagggcatggtggcgtgcacctgtagtcccagctattcaagaggctgaggtgagaggactgcttgaacctgggatgtcaaggctgcagtgccaagatcatgccactgcactccagcctgggcgacacagcaaggccctctttaaaaaaaaaagaagtgggaagagccaatactgtctctatagatcctggtttgagtaatgaggcaaatgggagtgctctctactgagatggagaaaatagggagggcgggatttgaacccagcactctgcctccagggcctctgttcctaatcaataaccaatgctaccctgcaaatatctgctgagatcctactatgtgccacccactattgcaggcacagggaatgagtgatcagatgacagtgggaatggggagaggaatcgaattatccacgtcatgactttctctgcacctggatgttctcatctacacaacggagttaactgtcccaccttgcagagctgttgtgacactcataaactccttggccccacagaaagcagtccatccatgtcactcctgatcagctactagcctcgaacccttcctctcaattattcgaagcctgaagacggacccaggtctcctcaattccaaggcaagcagcactggccccagcctctctgcaagccccacttcccttttctttcccctacttcttcttcttttttttttagacagattctcgctcttgtcacccaggctggagtgcaatggtgcgatctcggctcaccacaacctccacctcccgggttcaagcagttctcctgcctcagcctcctgtgtagctaggattataggcgcacgccaccaagcccaggtaatttttgtatttttagtagagatggggtttcaccattttgggcaggctggtctcgaactcctgagctcaagtgatctgcctgccttggcctcccaaagtgctgggattacaggcgtgagccaccagtgcctgacccagagtgatcttttttttttttttttgagacggagtctcactgtcacccaggctggagtgcagtggcgtgatctcagctcactgcaagctccgcctcccgggttcacgccattctcttgcttcagcctcccaagtagctgggactacagacgcccaccaccacgcccggctaatttttttgtatttttagtagagacggggtttcaccgtgttagccaggatgggcttgatctcctgacctcatgatccgcccgcctcggcctcccaaagtgctgggattacaggcgtgagccacctaacccggcccagagtgatctttttaaatacaaataagaccacgtcatcctctgcctaagatcactattcactgtgctctgaaaaaaatccaaaggcctgctaggccctgcatgacccactcctgccaaccaccatggtttgcaacctctcctggggatcccatgcaccagccagccacatggcctttcaggccccgactctgccaagctccttgcccccactggcttttgaatatgcagagctttcatcctggaacaacctccctccatcagcacctcccaatatcacacagaggcccctgcctttgcagagaccttcctcactcctccctgtaatgcactaacctcgtctggttccttctcataacatgtggtgctttctttttctcttctgagcactcacaataatttctgaatatatattcatatgtctacttgtttacttggcacaggcctccaatgcctttccttctctctctcttttttttcttttcttgaggcgttgtttcgctcgttgcctaggctggagtgcaatggcgcaatcttggctcactgcaacctccgcatcctgggttcaagcgattctcctgcctcagccgcccgagtagctggaattacaggtgcgcgccaccacgcccggctaattttttttttttttttttttgagatggagtctcactctgtcacccaggctggagtgcagtggtgaaatctcggcccactgcaccctccacctcccaggttcaagcaattcttctgcttcagcctcctgagtagctgggactacaggcgcacaccaccacgcccagctaaattttctatttttagtagagatggggtctcaccatgttggccaggctggtctcgaactcctgacctcgtgatcctcccacctcggcctcccaaaatcctgggattataggtgtgaaccactgcgcccaacctaatttttttgcatttttagtagagatggggtttcatcatgttggccaggctggttggctgggcaccgtgactcatgcctgtgatcccagcactttgggaggccaaggcaggtggatcaccctctttttttttttttttttttttttttgaggcgaagtcttgctctgtcgcccaggctggtgcaatctcgcctcagtgcaacctctgcctcctgggttcaagtgattctcaagcctcagactcccaagtagccgggattacaggtgctcgccaccacacccggctaattttgtgtacttttattagagataggattttgctgttacccaagctggtctccaactcctggccccaagtgattcgcccacctcgacctcccaaagtgctgagattataggtgtaggccagcacgcccagcctgccctctcactacaaatctccttctcctgggtaacttttcatgatcagaattatcctcttccatgccgggtgcggtggctcacgcctgtaatcccagcactttgggaggcctaggcgggcggatcacctgaggtcgggagtttgagaccagcttgaccaacatggagaaaccccgtctataccaccccgggcgtggtggcctgcgcctgtaatcccagctacttgggaggctgaggcaggagaatcgcttgaacccgggaggcggaggttgcggtgacctgagatcgcgccattgcactccagccttggcaacaagaacaaaactaggtctcaaaaaaaaaaaaaaaagaaaaagaagtatcctcttccaggaagcttcactgacacccctaggctgggtcatgtgcctcctcagggctcccacaacatctccatcccaacacagggcctgacacatgggagttgagacaagttaggttgaatgaataaatgaaacacacagcacactcacggagatgaagagacaggaaaagggggccaacagcacaatacaggttcgcttcttaaatgagcggtaggcatggccctctgcgctcccggggggccacgaagctgtcctaagggtgtgggcgacagcaggcgggtactggggagccacggaagggtggggagcagggaagggcggatcgctaactgcaaatgaatgaaagttgcatttctctgcatatcgcacgctatccagtcccaagttgttttcttctaaaggaatttcctaaagaatcgccccccaaggggcctcctacccgaacctggcatcccagcgctgtgcacacctcagggttccagatccttgatctcgtgacctctgacctgcagtgacctcgccaaccgacgcggccgccccgccacgcccccgcccgcccgatctcctccgccggccacgtacgccacttacgcagccggggcgtccccgcagccgccgccgccaagcctgccgggtgcatccttcgccgccgccacctaagccgcggttcggagcgtgcccgcccggctcccgtacccacgccccgccggcgaagagacagccaatggacgtcaggattgagggaaggcctcgcccccacccccccgacccctccagccccccccttcacggaggcctggacgactgggcggtgccttacgtaagaggcggagactgggctactgggctcatgcagtaaagcgagtcaaggcctgagtggcaggagggcgaggccgggaccaatcccaggaggaggcggtgtctgccacgacagaaaatgagtgtctgccccttgccggggctcacgcccctaactccagcactttgggaggccgaggcgggaggattgcttcagcccagggattcgagactagcctgagcaacatagtgaccctcgccccgccccatccctacaattttttttttttttaatttagccaggctcagtggcttaacgcctgtaatctcagcactttggaaggctgaggatcgcttgagcccaggagttcgagaccagcctgggcaacagcgagatctccatcgctacaaaacattttttaaaatgtaaatatcgagcgaaaaggtcgatgggaaatgcagttctctgcagacagccgttcagtttgggtcattgagagcactggagagccagaaaaggctgtggagcaaggaaaagagaaacatttgtgttcctgaggggctaattggagttgtaggggcttatacaatttttgacatcccttaggtattaaagtaaatatttatttattttgagacagggtcttcctctgttttccaggctgcctcggaccccctgagctcaagtgatcctcctgcctcagcctccccagtaactggcaccacaggcatgcaccaccatgcccagctaatttttaaattttttgtcaaaacaggatcttgctatgttgcccaggctggtctcgaattcctgggctcaagccatcctcctgcttcagcctcctaaagcattaggattacagacatgagccacagtgcccggccttaaagtgaatatttagagtgagaaaaggaaacccaacaagttaggtgagaagaaccaggtgtctctcttggaatagatcttaaggcagtttcccagaaattcataaaaatgttctcacattgcaacctggttccctctgtccaccaaaagcattctacaacccccagcaactcacagcacacaggcgcacctgcaagtgaagagccctgcccacctagcgtccttagtctctcctctctctgactctcagtctccccccttctctccctctcagactccccgacttatctcaggaaaacatagtggtggaagttacttctgcgcagcgatagcgcatccggaaggatgtcagcaagtgaccctatcgctgtggcttcctcttcctcctctgagacgttgtctttttggagaccttaagggctgctcctggtttctcagtgatgagtgctggctccactgtggttcctttttgtgagcgaaatgcccgcattcttcttcacctctgatttagcctctgtcccctgggctccaacaccattttctcctcatcctcagccctctcttgctctggttgctccagatacatctcttccataaatgtttttttttttcttattgcttttttgtttgttttttgagatggagtcttgctctgtcgcccaggctggagtgcagtgatgcgatctcggctcactgcaacctttgcctcctgggttcaagtgattctcctgcttcagcctcccgatagctgagattacaggcgtgtgccatcgcacctggctaattttttgtatttttagtagagacagggtttcgccatgttggccaggctggtctcgaactcctgacctcaggtgatccacctgccttggcctcccaaagcactgagattacaggcatgaaacaccgcacccagccttatgtatatatatttaattaataaagcaagtactgccaagtgcagcggatcacgcctgtaatcccagcactttgggaggccaaggcgggcagatcacctgaggtcagtttgagaccatccttgccaacatggcgaaaccctgtctctacttaaaatacaaaaattagctgggtgttgtggcgggcatctataattccagctacttaggaggctgaggcaggagaattgcttgaacccaggaggcagaggttgcagcgagccgagattgtgccattgcactccagcctgggagacagagcgagactcttgtctcaaaaaaaaaaaaaaaaaaaaaaaaaaagcaagttcattagttcattggcttcctgctggcctcatgttcaccccttaccagttgtgtgactactactttttatttttttgaggcagggtctactctatcacccatactggagtgcagtggtgcgaccataactcattgcagtctctaattcctgagctcaaacgatcctcctgcctcagcctcccgagtagctgggactacagacgcatgccaccacacttggctaatttttgtattttttgtcgagatggggttttgccatgttgcccgagctggtctcaaatgactacttcatttttaagcctaaattttctcatctgtttagtgggaattatattgggacggggttgagaattcagtgcaagttcaggtgtccacagggcctggcagaatgtaagccttcgatcactggcacctattgtgttactgattctattatcaggtgcctctgcttctggattgtcaaccccaagttgggctctgcccggtgatctgccagctctttaatagaaccagctgggacatgtctgagctgagccccaagccccactcctctgccagtcggatggggttaggactctgggctgccctccaaaaggctgtcaggaaggcgctgagttctggctggaggcagaagtggagagacttacgggggggcgcagaaagaaaaatttcctcttaaatagaggcgtgtatttgtgattctgcctggcttgtttccattcatccttcatgcttcagctcagctagccccttcctcaggaagctctcttgacctccctaggcaggggtggttgcttcctctggactcccagggccctctagggctccctgattccaggcttgatcattgtacccttgcttccctcatcacagccctgaccactctgggctgtcttttttcttttttttagagatagggtctcactctctcccaggcatagctcactgcagcctcgaactcctgggctcaagcaatcctccgacctcagcctcccgagtagctgggacaacaggcgtgggtcactcttgtgtcagtctcccagttagactgggagccccatgaatgcatggcgcaggatggtctcatcattactgagtctccaggatcatccagcgaggggtcagcagaaagtgggcattgaacaaagctttggtgagtagctgaggatccccactctgtccacacgggcacaggggacacctgactctgtggtgtccgctgttcccactccgaggctcacaacttggcgaatggagcgagaattggatttcagtttgccccttgctccgtcagccgcgcgccctgatgcagtgcacaaccttagctgctgtgcgcgatggggggcgactcctcggcctgcgagcagagaggaaagttcagattcttctaacatagagaaccagccttccaggaggacgagaaggaaggaatgaggggaagagaggactacctccaccctttccatcccgttggtctgctgggtctgggagcactgggctccaccctctccgaacgaacacctggcggttgggcgtgcctcagtttcccggaggcggggcattcctccgtcgccgccccccacctcccctttttcctcttcctcttggggcatctgctgccgcgcctgtagcactcccggaactggaactaggtgccagacggtccggaggcgggggccacgtcagcggggccacccagggctcgcggggtcccggtgggtgccatgcggaggggcgcgcttctggcgggcgccttggccgcgtacgccgcgtacctggtgctgggcgcgctgttggtggcgcggctggaggggccgcacgaagccaggctccgagccgagctggagacgctgcgggcgcagctgcttcagcgcagcccgtgtgtggctgcccccgccctggacgccttcgtggagcgagtgctggcggccggacggctggggcgggtcgtgcttgctaacgcttcggggtccgccaacgcctcggaccccgcctgggacttcgcctctgctctcttcttcgccagcacgctgatcaccaccgtgggtacgtaagcgcctcaccgcaaggcggcgaggacccgggatccccacttcatccttaacccctggggaccccggggccctcacgaatacccttatcccaatcccctctgggcttcggatcccccgaaaagaccccagtgaggacccgggacccaggctcatgatatctgctctgctcggggagcccaagtccgagcccttcctcctaagtaggaaacacccagctcccctcagagtacctttgcagagaccagctgggaccccgttcctcggtcttttttttttttcttttctttttctttttttgagacagggcttactctgtcgcccaggctggagtgcagtggcacgatctcggatcacggcagcctccgcctcccggtttcaagctattctcctgcttcagcctgccgagtagctgggattacaggcacataccaccatgcctggctaatttttgtattttcagtggagacggagtttcaccatgttggccaggctggtcccaaactcctgacttcaggtgatcagcccgcctcgccctcccaaattgctggcattacaggcttgagccactgcactgggactgcattccccggtcttaatcctcttggtgacccgggtctgtccagccccctctaagcctaggactgtcctcagagacctccagcaaggacccaggacacgccaccctccaagggagatccttgccccctctggacccagaactcaaccatgccaggacccctgactttatctctagtctgggcctgccacccttgccatgtctcctgaccctccagatatgtccttctgggaaacccccctggagaaaccccatctcaacctcctcctgaccctggcgccttagcgaggaccctaaatctccagacctctcagggtgtcctcactaaagacctccctcccaacagagattcctcagcaaggacctggcaccgccatctgggactcctggccctctggacctgggcctctgctccagactgtcatctgtctcctggccccatactccccagcaggcaactctgaccccagacacaaaacccttccctaggtaccccaccccatcttgacatctcccctatatggggtcactctcaatgcaggattttcctcccaatagggacaccacctgttccctctggacctgggactcccaattcagcagccccagctagggatgtgtcaaaaggacccaccgtggagggaccccgagttttgggaaaccctgagaagccagacttgggaaatctctttgttgccaggctctgctgctcccccagccccttctcagctcccagacttcctctttgtttctttgttggggatttgttgaggagaggaggctggtgcagggttagcccagactcctaactcgccctcccggccaacaatagggggcagcttttgcttttggtcccctggcagcagagctgggtgacttctcgttagctgacctcccctgggtctgcccatgctgccagggcggcctgacctgcttctgagcttccctgggtcatgtgcacgcctcctacctcttcccagatcctggcttctaagaagtcatccctggcagggcagatgagggaagccagacacacgtcaggcacagcctggctacatccctgctcagccgcggctcattgccaggcctcagtgtcctcccccattgctaaaatggagataataacactccccatttccctgtaatagcagtagcctgacagaggacttgccaatgcatgctttaactcacttaatcatcacaacagccttgtgaggcaggcgcctttataggctgtatatttttagccatggaaaccgaagcctagagaagttgggtaactttcctaaggtcacacagcaaagacggcatagagtagagatttagtcaaggccatcaggctctagagtcccatgctgctagccaacacaccacactacttagaagaagggtgctgtgtgtgttgtaaaagaaaaaaatatgctaacacttgttaaaaatggaaagttattgtggtagaggagagaccattgcaaaggccagagagactgaactcaactgtgaatatagcaaacacagctggagttttatggctaacaagtagaataagggagtcagtggatggaagaatactaagaggagagacattcgggtagggggattcttgctaaactcagcttaacaagattcttgctaaagacaggccaaggacttagatattgagagggggtggatgagggccaggcgcagtggcttacgcctataatcccagcactttggagggccgaggtgggcagatcacctgaggttaggagttcgagaccagcctgaccaacatggtgaaaccccgtctactaaaaatacaaaaatcaaccgagcattgtggcaggcacctgtaattccagctactcgggaggctgaggcaggagaatcacttgaacctgggaggcagaggttgcaataagctgagattgtgccactgcactccagccagggcaacagagtgagactccatctcaaaaaaacaaaaaacaggccgggcaagttggctcacgcctggaatcccagcactttgggaggctgaggcgggcggatcacctgaggttaggagttcgagaccagcctggccaacatgacgaaaccccatctctactaaaaatacaaaaattagccaggcatgatagtgcgtggctgtaatcccagctacttgggaggctgaggcaggaggatcacttgaacctgggaggcggaggttgcagtgagccgagatctcgcccctgcactccaggctgggcgttagagcaagactctgtctcaaaacaaacaaacaaaaaagagtggtggatgaggaatttgatcagatatcggggtgggtggcttgtaggattcttgctaaaactgggcctacttaaggactcaggagtcagactgaagtgcggtcaaggagggagtctttgtccgtgcgaagcgctggtaataactgatgtttattgagttaatgttgactgttttcatagtgggtgaagccttgaatgcatctggagaagtggaaaaccaattaaacgtgattcagagagacctcttcccacaatgcccctcgtttggtcataggcccaaatcttggccctggaattgatctgggcagccttgctgcacttgaggcaggaggaagcgggtagtcctacccggaactgggaatcggagagaggaagtgagcattacaatccttgtaactctttccacgctcttgctaggcactatgccctatcccagcctagtaggattactaccacatttgaggaagggattgttttttgtttttcagacagggtcttgctctgtcacccaggctagagtgcagtggcgcagccttgacctcctgggcttaagtgatcctcccacctcagcctcctgagtagttggaaccacacgtgcacgccactgcacccagctaatttttttattttttattttttgtagaaggtggtctccctatgttgctcaggctggtctcaaactactcctaggctcaagcggttctcctgccttggcctcccaaagtgctggaattacaggtgtgagccaccttgcctggccaggaagggattgcttacgagcccatttttgcagagagggaactgagcctcagaggggagaagtcatctggccaaagtcatgcagggagtaaatggcaaaacactgttttggactcttctctttgaaatagtaacttgaggctcacaggccccatgcttttcaaactctatgatttgtctatttataaagatctcttttattattattatttttttttacagagatagggtcttgctatgttacccaggctggtgtcaaactcctgggctcaagtaatcctcccactttggcctcccaaagtgctgggattataggaatgagccacctcacccagcctgtttataaggatttcatgtcatttgcaaacctgccaggctgctggagtttccccatcaaaaacccttgtattaatgagggttgggggtcataagtgatacacctcaaattacagttgcttaaataagaagtgtatttcttgttcacattccaggtagtcagtccaagtcgtactgcatggtcagagacctaggctccttctcagcaaaaccctggtgttcctgcctaactcctctgcgcaacttccattcccaaggtcgcctaatggtccaagatggctgtgtagctccagcctccatgtctgtgctccagccagcaagaggagggaggaaagaagggagactggcatccctcgctccttaaggacccttcctggaagttgcctgactctttcatgaatacctcattggccagagattagtcacagaaccacacctggctctgcaagggaggagggaacgtcctgattccaaaaggccatgtatccagctaaaacccagggggagccttttaaaattattattattgttattattttttaaagtagagatagggtcttcctatgttacccaggctggtctcaaattcctgggctcaagtgatcctcccaccttagcctcctagagggctggggttacaggtgtgaaccaccatgcctggctgggatcatttcttttcccaagttttttattatagtaaaatacacataacataaaatgtaccatcttagtcatttttaagggtacagttctgtgacattaaatacattcatattgttaccatcatcaccttcatcttttttttttttaatagatacgaggctggccatgccatgtgggagatggagttattgctcaactcaaatcactctccaccatccatctctaaaacttttttttttttttgagacggattcttgctctgtcacccaggctggaatgcagtagcacaatcttggctcactgcaacctccacctcccaggttcaagtgattcttctgcctcagcctgctgagtagctgggactataggcgtgagccaccatgcccggctaatttttgcatttttagtagagacggggtttcaccatattggtcaggctagtcttgaactcctgacctcataatctgcccgcctaggcctcccaaagtgctgggattacagacctgagccaccacgcctggcccattgtctcgcccattttagaatagggcaagctgaggctcagagccaggcaagagcctgcacccttcattctttgttttgagaagtactgatcgagcgcccacagcagtgatgaaacacgcagaacctcctgctttgctgaactggcagcctatgagaagacggtaaaccatagagcatgctagaaggtgttaagtgctatgggaaaaaaaagtgttgggtaagaggatgttaccatttagggtgctcaagggaaagcctcactgagaaggtgacatttggatgaagaagacctggagaggagagaggggagcattctttggggaaggaacaaccagtgcaatggccctggggtgggagcgtgctgccctggtggaccctgtggggcttcatgggtcatgatgaggactctttccttttacctgagtgaggtggggccacagaggggctctgtgcagggaaggggcatgactgaactcaggtgttggcaggctctgctggctgaacagattgtaggggctggggatggggaagggagacccaggaggaggctgctgtggtggacaggaccagggtgggggccatgggactgggtgggggagaagtaagtgggttttgggcctatttgaaagttgagataataggcttcactgacagatggagtgcggcatgagtgacgagggcgtcagggatgaaggcaaggctcttggcctgagcgtcgaaggacagaggtgccatcacctgggacaggaggggatgtggggagaggcaggtttgggatgaagccatgtgtaggtgtgggtgtccgcagacctctcgctgcaggtgttgagtgggcaggagggttttccctggctgggtcctggggatcagatctgtaactccaacaccttggaaggcaaaggtgggaggatcactagagtccaggagctcgagactagcctgggcaacatagtaggaccccatctctacaaaaaaatttaaaatcaacggggcgtgctggacatgcctgtagtcccagctacttaggaggaggctgaggtggtaggatcacttaggtccaggagttcaagactgcagtaagctatgatggcaccgctgcactccagcccgggtgacagagtgacccccatctctaaaaagaaaaagatttaccctttactctctttactcccctaggctatgggtacacaacgccactgactgatgcgggcaaggccttctccatcgcctttgcgctcctgggcgtgccgaccaccatgctgctgctgaccgcctcagcccagcgcctgtcactgctgctgactcacgtgcccctgtcttggctgagcatgcgttggggctgggacccccggcgggcggcctgctggcacttggtggccctgttgggggtcgtagtgaccgtctgctttctggtgccggctgtgatctttgcccacctcgaggaggcctggagcttcttggatgccttctacttctgctttatctctctgtccaccatcggcctgggcgactacgtgcccggggaggcccctggccagccctaccgggccctctacaaggtgctggtcacaggtgagctgggtggctagggcagggctttgaggaggacctagccctgtccctgggggagttaaaggctcacagtcccactctgggacttccaaaagggatccaaccccaccctgcagggtccagtagaactgcggccccgcctggaaaatctgagccccaggatgaccaacgccccttctccgcctttacagtctacctcttcctgggcctggtggccatggtgctggtgctgcagaccttccgccacgtgtccgacctccacggcctcacggagctcatcctgctgccccctccgtgccctgccagtttcaatgcggatgaggacgatcgggtggacatcctgggcccccagccggagtcgcaccagcaactctctgccagctcccacaccgactacgcttccatccccaggtagctggggcagcctctgccaggcttgggtgtgcctggcctgggactgaggggtccaggcgaccagagctggctgtacaggaatgtccacgagcacagcaggtgatcttgaggccttgccgtccaccgtctctcctttgtttcccagcatctggctgggatgtgaagggcagcactccctgtccccatgtcccgggctccactgggcaccaacataaccttgttctctgtcctttctctcatcctctttacactgtgtctctctggctctctggcattctcgctgcctctgtctttccctcttgctgtctctgtttctcattctctttcatgttccgtctgtgtctctcaattaaccactcgtcaactgctgattctactgggctgtgggctcagacctcatttcaggcaccagattggtcgctacaccctggacaagtgactgcccgtctctgagccttgatttcctcagctgccaaatgggaagaatagaagaatttgcccctaaacccctcctgtgtgctggccctgtgctagacagtgctggagacatagttgggggtggagaactgcccttatggagcttgcagtccagtgaggtggacagacctgtccccagacagtgatggcccaaaatggtcaggactttaatggaggaggtgaggtgttgaaagcacaggcagagtggtcagggctgaagtcggagaagcatagggactaggcccaatccagcctggaaagtcagggaggacttcctagaggaagggacatcgaactaagacctgaactatgagaaataggcaggaagaagttgtacctgactcatttttctcaggtgtctccagggagcaggacccatggagggacccctggtgtaggcctgggcgatagactcttcctcagcagcctggcaggcaggaaacagacataggaccccagcccagatctgaatggcatgggaggtgctgcccttaaccatgacaccattgtaagagctgtccacatttgtatgttgtgccctggaatcagcctggttgagctcaaatcccaacttagccacgtctggcctgtgtccttgggcagtcacactacctctctgattttgtttccttatctgtaaaatggtgatcatcataatacaacttcaaaaggatttcaggctgagtgtggtggctcacgcctatacacccagcactttggaaggctgaggaaggaggatcgcttgaggccaggagtttgagactagcctaggcaacacagtgaggccttatctcaacaacaaccacaaaatctaaaaattagctgggtgtggtggtgcatgcctgtgatcctggctacttcagaggctgaggtggaaggatcacttgaggccaggagtttgaggctgcagtgagttatgatggcactgctgcactccagcctgcgggacagagtgagaccctgtctgaaagaaagagagaaagaaagaaagaaagagagagaaagaaagaaagaaagaaagggaaagatggaaggaaggaaggaaaaagaaagagaaagagagagagagagaaagaaaaagaaagaaaagtaagaaagaaaaaagaaaaagaaagaaaagtaagaaagaaaaaaagaaaaagaaagaaagtaagtcctggctaacacggtgaaaccctgtctctactaaaaatacaaaaaattagccaggcgaggtggcaggcgcctgtagtcccagctactcgggaggctgaggcaggagaatggcgtgaaccccggtgggggcggagcctgcaatgagccgagatcgcgccactgcatccaacctgggtgacagcaagactccgtctcaaaaaaaaaaaagaaagaaagaaaagaaaagaaggaaagaagcggggcacagtggctcagtcctgtaatcccagcaccttgggaaggccaaggtgggaagatcacttgaggctaggagtttgagacaagcctggccaacatagcaagaccccatctctacaaaaataaaaattttaaaaagggctggggcatttgagctgggtcccaacagtagacaagtagaaaaggcatggagagggcataccaggtgggaggagctgtgtgcaaaggcctggagatggaaaagcatgctggccaccagcttctgacaagcagtttagtatgaacggtatgcagggaaagagggaaggagggcagaggggtgcgcacgagcacccgttagtgtccttaaatgaccagcatgggaacctggtctctttcctgagggccctagagagccatggaagggtttagagtaggagtgggtcatggttaggtttgggttttaggatgatccccctagttgctctggagaggtggagcagagcgggtactgaggctgggtgcctgtgggaggctgaggcaggaatgaagagggagacgatgggcctgggctgagccatggaagggaggaggggtgagtgcgggcacactcaggagccaagtggacaggccatagcccccacagactggagggacgcggctagggaatgtcccacagagtggccagttatccctgagagaaagagcaggttttagcggagacgctgaggctgctttagaatatggtgggtgtgtggggcaaaagggacacccaggggtgtatcaagaggtcatagggggcaggccaggtggctcacgcctgtaatcccagcactttgtgaggccgaggcaggtggatcacctgaggtcaggagttcaagaccagcctggccaacatggtgaaaccccgtctctactaaaaatacaaaaattagctgggtgtggtggcacatgcctgtagtcccagctacttgggaggctgagacagaattgcttgaacctgggaggtggcggctgcagtgggccgagatcacaccactgtactccagcctgggcgaaacagagactctgtctcaaaaaaaaaaaaaaagtcataggggctgggcatagtggctctcacctataatcctagcaaatcgtagtactttgggaggccgaggcaggaggattgcctgagcccaggggttcaagaccagcctcagcaacataaaatacaaaaaatacaaaaattagctgggtttggtggtgtgcacctgtggtcccagctactcaggaggctgaagtgggaggatcacttgagcctgggaggtcaaggctgcagtgagctgtgattgcatcactgtactccagcttgggtgacagagcaagaccctgtctcaaaaaaaaaaaaagaaaagaaaaagaaaaagaaaaagaaaatatgtatattggatatactatgtgccaggcacgattccaagcccctgatacattctctacattttacagatgggggaaggaggtccagagatgttaaatacttgcccaaggtcacacagaaagtggaacactgggatttgaacaaggttttggttgggcatcttttcctatgggagctcagaaatatctgttgtctagccctttctcagcctcccaaccttctcggttccttacctatgtcacagctgactttgagctaaagtcatctcggggcagctaggtgcctatgtgagctggcgttcatttctcactgtttctccttccaaatacctccaggaagaaaagcaagtcctttttggtccaagacattaaaaaagccaggctcagcggctcatgcctgtaatcccaacacttggggaggctgaggcaggaggatcgcttgagcccgggagctggagaccagcctggacatgttaacatagcaagacccctctacagaaaatgttaaaaatgagctgggtgtggtggcgcacacctgtagtcccagttactcaggaggatgaggcaggaggatcacttgagcctaggaggttgaggctgcagtgagccatgatcacactactggactccagcctgggccatagagcaagaccctgtcctaggagaaaaaaaagggccaggcacagtggctcacgcctgtaattccagtactttgggaggccgaggcgggcggatcacaaggtcaggagatcaagaccatcctggctaacacagtgaaacccgtctctactaaaaatacaaaaaaattagctgggtgcggtggcacgcacctgtgatcccagctactcgggaggctgaggcaggagaatcacttgaacccaggaggtggaggttgcagtgagccgagatcccaccattgcactccagcctgggagacagagcgagactccgtctcagaaaaaaaaaaaaaagaaaaaagtgtgtgctaaaaaattcatcaggtactaaagagtgtacggtggaaagtaagtctttctcctacactcagatcatggatggatgtctcaggtcttcccaggcacatttgatgttatgtaccagccatatgcatgtgtgtgtcatttatttttcactctacacaagtagtacctaatatggtgaggttgttatgattacagactctggaggcaaagttcctgggtataaatctgaactctgtcactcccaagctaagtggctttgggcaagtgatttcacctccatgtgcctcagtttgctagtctgtacaatgggatggtaatagcacctacctcatggacttgagaagtcagcaacttcatacctctaaagcccttagagctagcagtgtgtggcactcaataaaatgttgactaatgatgattctcacttctgtactatgctttttcgtaccaattataaatattaatattttaatgtcacctttcttttattcatgtttctgtaccttgcttttgtcaccaacacagtgtaattcagagataatttcagagacatacaataggtctttttttttttttttcttttttgagactaagcctcgctctgttgcccaggctggagtgcagtggcacgatctcagctcactgcaacttccacctcctgggttcaagcaattctcctgcctcagcctcccgagtagctgggattacaggcacctgccactatgcccggctcatttttgtatttttagtagagacagggtttcaccatgttggccaagctggtctcgaactccagatctcaagtgatccacccgcctcggcctcccaaagtgctgggattacaggtgtgagccaccacacctggccacaataggtcttatatcttacggtgtctcctctaggacacatttcccataaataatttcaacatcccctgttgatgatacgtgggtgttttccagtcttttgctggtacaacaatgctacagcaaacatcttatggtttaagatctaatgaagggatcgaatgaggcaggagttcaagaccaccctgggcaacatagcaagaccctccctgtacaaaaaatttaaaaattagctgggtgtggtggaacaccagctagtcaggaggctgcggcaggaggatcacttgaacccaggtgtttgggactagcttggacatcatgtgagacctcatctctgctggacatggtggctcatgtctgtaattccagcactttgggaggccgagatgggaggattgcttgaggccaggagttttagaccagactggtcaaaatggtgagaccccatctctatttttttttttttttaaaagatgaataaaggtcgggtgcaatgaagcacatctgtaatcccagcactttgggaggctgaagcgggtggatcgcttgaggtcaggagttcgagaccagcctggccaacatggtgaaactttgtctctactaaaaatataaaaattagtcgggtacggtggcagatgcctgtaatcccagctactcaggaggctgaggcaggagaattgcttgaaacggggaggtggaggttgcagtgagctgtgatggcaccactgcactccagcctgggcgacagagtgagactttgtctcaacaaaaaaaaaaaaaaaaaaagggaaaaaaagaagatgaaaaagaaacccccatctctaaaaaaaaaaaagtaaaaataaaacaaattaactggatatgatgactcgcatctgcagttccagctacttgggaggctgacatgggaagatcacttgagcctgggagttcgaggctgcagcgagcaatgattgcgccactccactccagcctgggtgagagagtgagaccccgtttctaaaaaaacaaaataaaaaaaaaagggctctggtacatggctactgagtttcttcccctagaagatgtcaccgttccctagcctgcgggggtgggctggggtgggaaggatagaccaccatcatcggttcatttacataaaacaactattatatgcggtgcctggcagggctgggggacaacagaggcagagaaagccatacaccctgccctcacggagcttgtgatccagtggaaaagaaacacccatttccagtcatgagtggcctagaggggccaagaggtaggatgagggctggtcatgtatcacagagaagacctaaaggaaggaaagtggtgggccctgttaaaaagcatggaatggtattccagagggcattactgagtctgcacaggtctggagcatgcatggctcacacctgaccaaggatattcaagtcgctccatgtgaccagactgtggaccacagaggtctaagggggagagggcagatgagccagatagaatgacagggaggagagtatgaggggctctggaaaccgaggggtttggaagttttcctgagggcctagagggtcatggaaggttctagagcactggttctcaaggtgtggtctccagaccactagtatcagcatcacctaggaacttgccagaaatacaaattatcaggccccactccagatctactgaatgaaaaattctggaagtagccaggtagttactcaggaggctgagatgggaggctcacatgaggcctgaaattcaaggctaacctgagatagggtgttgctcttttgcccaggctgaaatgcagtggtgtgatcacagctcactgcatttccgtgtatttcagagctcactgcagcctcaaactcctgggctcaagtggtcttcctgcctcaacctcccaggtagctggggtcacagggatggaccaccacactgggctaatttaaaaaaattgttagcaacagggtcttaccatattgcccaggctggcctcaagcgatcctcctacctcagcctcccaaagtactgggattacaggtgtgcagcaccacatctggcttaatttttttttttttttttgagacagggtctcattctgtcgcccaggctggagtgcagtggagggatctcggctcactgcaacctccgcctcctgggttcaagcaactcctgcctcagcctcccgagtagctgggattacaggtgcccgccgccatgcccggctaattgttgtattttttggtagagacaaggttttatcatgttggccaggctggtatccaacttcagacctcaagtgatccgcctgcctcagctttccaaagtgctgggattataggcatgagccactatgcccagccagagactccatctttaaaacaaaaacaaaaactcagggtgtggtacccaccaacctggcttacccagccttttaggtgagtctaatgcatgctcaaatttgaaaaccactgggttaaacgtctggtctggagttcatcaaaaagtcatggcctgaatccttacctgtaaggcatcagaatgcaaatgaaaattaacttaatgaatattttacttgagccgggcacacttcccacaacagtataggatggctgtccttgtcctgttttgtagaggacggtgctaagcagcctattcattctcacaaggtctccaggaaaccacacttttttaaggagtagaattttggggtagggccgggcgcagtggctcacgcctgtaatcccagcactttgggaggccgaggcgggtggttcgcctgaggtcaggagtcgagaccagcctggccaacatgatgaaaccccgtttctactaaaaatacaaaaaataaattagccaggcgtggtggcgggagcctataatcccagctactcgggaggctgaggcaggagaatcgcttgaatccggggcaggggcgcggaggtttcagtgagccgaaatcgcgccacttcacactccagcctgggagaaagagcgaaactccgtctcaaaaaaatatatatatatatatatttgggtaggaagcacaagtagggaccgtgcttgctgccagaacaaccaatagaaactccttgaaggccttcctggcacaaacgtagtctccagcaccctctgccgaccaggccccgcgccctcagtgctgagacagcctccagccctcggtgccttaggggttgcgcgtcaccttggagaccgcgtgagaggagggcgtgcctctgcaaaggcggaagtcggctgtggaagtgtgggcggccattttgagaccgggcaagaggggcgggactggtgcggccgagtgacagttgaccggttttaaccaagtgactggtaccacggggccggggaaaaagctgtgccatccaggggcggggggatgccggggacggggaggaactaggaaggggaggggaaggggaaggcgagaaggggagaggcaggggaaagaggggaagagtcgtgggagctgggagaggagggaaagaggggaagagtcgtgggagctggcagaggagggaaagggggagccgaacgtgaagggcgaagggcggggcggggcaggagagtcggggtatagagcaggcaggtgttaatggcatgggaaggaagagtaagaagtggggcaagaaggtgtcgcggtacgaggggaaggtgagactcaagaaggtgccggctaagaagctggtgccggcgtggaaggagaaggtgtggggcgaggaaacaacgaagggcgaggaaagatcccgaggcgaagagacagttttcatcgagaaggggcagggcgaggaggaggggcgttaccagagggcgggacggggcgacgggcccgcgcgggaagaaccaatcgccgagaacccggggaaggaacgggtccataaagaccaagtggaggagtaggggcgcggtcaggagcggaagcagagtgaggagcaagccccgggcgagaaacgggggcccggccgggagcaagagcaggggcggggccgggagcaagagcaggggcggggcccggagacgggcgagaccaggtacagtacccagcccctgggcagaccccgagcgaggagaaagcggcgataccaagagaagtgcgagggtggggcaagaggttggggcacagccgggtggaagtacacgggtgcgatcgcaggcagaagcagtacgggggaacttaagagggggactgtcaaagcgagaaatagaaaccaagaccaggtgaagagcaagagtggaatacagggagggggcggaataaggagcaaggtgaggataaagttaaaggaagagacgtggaggcggcggggcggaacgaggcggaggagcaggggtgtggccagaaacattagtagggctggggcccggagcaatagcagaggtgcgatacccacgagggtcgggggcagggccaggagcaagagcaggggcgggaccaggagcaagtgcagaggcggagccaggaacaagagcagaggcggggctaaaagtccgtgcgggggcagggccaggagcaagagcaggggcgggaccaagagcaagtgcaggggcggggccaggagcaagagccggggcgtggccaggagcaagtgctgtgagaggcgcagaagcgaggtggaatcttaaaagtgggctccagagagctgtccggcgcgtgggtgttgactcctgcgttctccaggttctagccacgttatgtgcggcccagccatgttccctgccggtcctccgtggcccagagtccgagtcgtgcaggtgctgtgggccctgctggcagtgctcctggcgtcgtggaggctgtgggcgatcaaggatttccaggaatgcacctggcaggttgtcctgaacgagtttaagagggtaggcgagagtggtgtgagcgacagcttctttgagcaagagcccgtggacacagtgagcagcttgtttcacatgctggtggactcacccatcgacccgagcgaggtgaggggaccagggtcaagtgaaccagagggattttgaacccgcactccactcatttctggacgtgtggcctaacctctctttgcagaaatacctgggcttcccttactacctgaagatcaactactcctgcgaggaaaaggtgagtgggtgcagcacggataggctcattctatgagccttggttttcccacctctaacatttttatttatttatttattttatttttttgagacggagtcttgcgctgttgcccagactggagtgcagtggcgcgatctcggctcactgcaacctccgcctcccgtgttcaagcgatgctcctgcctcggcctcccaagtagctggaactacaggcatgtgacaccacgcccggctaatttttgtatttggtagagacagggtttcaccacgttgcccaggctggtctcaaactcctgacctcatgtgatccacctgcctcagactcccaaagtgctgggattacaggtgtgagccaccgtgcctggcccccatctcaatatgtggtagcaccatccaaccctggtggctttaaggattcaagaaggctgtctgtgtacagttcccagtaacccaccaagcacctagtaggtgctcaagtaagcttttttgttccatgttttttttgttttgttttgtttttgagacggagtctcgctccgcccaggctggattgcagtggcgcgatctcggctcactgcaagctccgcctcctgggttcacaccattctcctgcctcagcctcccaagtagctgggactacaggcgcctgccaccacgcccggctaattttttgtatttttagtagagatggggtttcaccgggttagccaggatggtctcgatctcctgacctcgtgatccgcccgcctcggcctcctagagtgctgggattacaggcgtgagccacctcacccggccttgttccaggtttttaaagctatgagtaggagtttaccatatatataattcacacaccataaaattcaccattgttatttttgttatttttctgaggcagggtctcactctgttacccaggctggagtgcaatggtgaaatcacagctcattgcagccttgacctcctgggctcaagtgaaccttctgcatcagcctcttgaatagctgggactagttgtgcgccaccacaccagcacgggaggatcacttgcatccagaagctcaagactagcctaggtgaatttggctgggcatggtggctcccacctgtagaaatgctaaggcaggatcatcataatgagcctaggaggttgaggctgcagggaactgtgatcatgccactacactccagcctgggtgacagagtgagaccctgtctttgtttttattaattaattaattaatttttgagatggagtctcactctgttgttggggtgatcagacccaacaccaggtcggggggagggggtggcgacgaagtccggcggagtcaaaggattgagaaaaaggcagtttgagagagagaagtaaagtgggaccagagggccattgctagtgtatggaggctgctaaagccccgagctctgggagcccacgctatttattggtaatccaacaaagaaacaggtggtgagaatgtggaggtcaaaagggcacattgcattaagcacatgatttacagctgtgatggtttagcatttgctctgctgcttgagataatggagagcaggttcttttaactcaagatacaatcaatcctgggagcgcaaggagcaagcaagtctagacacattccagagccatgagccctggattctatcgaggccatgagggattttatgcccttggcttagattatggtgcatgatggtaggcttccaccctttagcacagagcttggtgttccaaaggccacaaggggttttagaccctggaccccggacatgttccaagactcttttacattatgtcagacatgcaagccctgcctcagcttctcctaacactctgtcgcccaggctggagtgcagtggcgcaatctcggcacactgcagtctctgcctcctgggttctaagcgattctcctgcctcagcctcctgagtagcaggaattaaagtttttaattttggtgaagcccagtttataaatttttttcttttttttgcttgtgttttttgtgtcatttacaaaggccttgcgtaactaaagatcatgaagacttactcatattttcttcaagagatttttagttttagctcttacatttaggtctttcatccattttgagttaatttttgtatatggtgtgaggtccaagcttttacacgtgcatatccagttgtcccaatgccgtttggtgagattcttcttttttttttttgagacaaaatctcattctgccacccaggctggagtgcagtggcgtgatcttggctcactgcaacctccccctcccaggttcaagcgattctcctgcctcagcctactgagtagcaggaattacaggcatgcgccaccatgcctggctaatttttatattttagtagagacagggtttcaccatgttggccaggctggtctcgaactcctgacctcaggtgatccacctgccttggcctcccaaagtgctgggactacaggcgtgagccaccatgcctggcctgttgagattattctttccccgctgaattgtcttggcacctttgtcaaaaatcaattgaatataaatataagggtttctttctggactcaattctattctaaatgaattgatttctcaataattcattgctctaaatgcctattcatatgccagtatcacagagtctttttttttttctttttttgagacagggtctcactctgtcacccaggctggagtacagtggcatgatctcggctcagtacagcctacacattctgggttcaagcgattctcctgcctcagctgcccaagtagctgggactacagatgtgcgccaccacgcccggctaattttgtatttttggtagagatggggtttctccatattggtcaggctggtcttgaactcctgacctcaggtgatccacctgcctcggcctcccaaagtgctgggattatagatgtgagccaccgcgcccggccaataattttatttttttagagacagggtcttgcgctgtcacccaggctgaaatgcagtggcttgatcatagctcattgcagcctcgacctcctgggctgaagtgatcctcctgcctcagcctcccaagtagcagggactacaggctcaagccatcacaccagtgtactttcaattagacagggtctcactatgttgcctaaggctggcatgaaagaatttctgagagtagtattaataaatgcaaataataaaatgaggtaatacgttagaaaggaggggggggcactgttttagtgggggtcgttggagaaggtcactctggaaaggcttgagcagagactcaaatgataaaaagtggggattattaggagagccaggtaaagctttccaggccgagggaagagccagcacgatggcccagaggtaggaaagaggtcagcatgtgtgagaaactatgaagaggactttgtggctggagcagagtgagtgagagggagtgtgggaggagaggtcagggaagtgatgggggaaggtttttggggcttgatgggccatggtgaggacttggcttttactctgagacagagcctgagagggccctatgcagaggagggattggatctgattccaggcttcactggctccctcctgttgttgggggagcagggcaggagcagtgagacaaggaggaggctgctacattgcccaggcaggagatgacggggacaggaccagggtgttagtggctactgtcatcctcacaggaaggaggtccctgccccactagcaccttctcctctgcaatgggaactcaggcagggccagggacaggtgtagttgacaggattgaaaagagcctggtgctgggtgtggtggctcatacctataatcccagcactttgggaggccagggagagaagattgcttgagcccaagaattcaagaccagcctggacaacatagggagaccctgtctctacaaaaaaaatcaaaaaattgggccgggcatagtggctcatgcctgtaatcccagcactttgggaggccagggcaggtggatcacctgagttcaggagttcgagactagcctgaccaacatggtgaaaccccatctctactaaaaatgcaaaaattagccgggcgtggtggcgcatgcctgtaatcccagctacttgggaggctgaggcaggacgatcgcctgaacctaggaggcagagggtgcaatgagctgagatggcgcccttatactccagcctgggcaacaagtgcaaaactccgtctcggaaaaaaaataaaaaataaaaaaattagccaggcgtggtagtggtacctgtagtcccagctatttgggaggctgaggtaagaggattgctgaagtctgggagaggtggaggttacagtgagctgtgatggcaccactgcactccggactgggcaacagagcaagaccttatcttaaaaaaaaaaaaaaaaagccaggtgcagtggcttacacctgtaatcctagcattttaggaggctaaggctggaggattgcttgaggccaagagttcaagaccaacctggccaacatagcaagaccctgtcccatgtaaaaaataaataaataaataaataaataaataaattacagaaatagccagcctgggcaacagagtagactctgtctctacaaaaattaaacagttttcaaagaaagaatggcctggtggctcatgcctgtaatcccagcactttgggaggccgaagcgcgcagatcagttgaggtcaggagtttgagaccaggctggccaacgtggtgaaacctcatctttactaaaaatacaaaaattagctgggcatggtggtgcacgtgtgtagtcccagctactcaggaggctgaggcaggagaatcacttgaacccaggagacagaggctgcagtgagtcgagatcatgccactgcactgtagcctgggcgacagagtgagactccttcttgaaaaaaaaaaaaaaaaggaaaagaaaggagcctggcaaagaaagtaaagaaagtcagccctctcgatgaagggctgtgcacaggtgctgaatctggtaaatccctcgccctggtcccacagcaaccaaggcctccccttggtggcctgagtgccgccttctctcggggacgcctcttagccttcactggtgctgttctgcatgcctgaaacatccttctcctcttctcccatctccactctaagcgctccccacccttttctattcagccaggatcccgcatccctgggaggttgtccaggcatgccctgtcaccctcgtcctcagtcccttcctgtgtaatcgccccatcctacactcaccccaagctcaaggcccagaacttggctgtcctctgacttgcataggtggcagaaagtctgctgcagagagggtggaagcccacctcaagagtgagactgggggccagatgagatggctcacgcctttaatgccagcactttgggaggccaaggtgggaggctcacttgagaccaggagttcaagaccagcctgggcaatctaattttttttttttaagcctggaactgggaatccctggagtggaaagcagcaccctgggtgccacatccctcccaccttcccagcatccctcccacctgcacagttttgttcatcccatgctgcccttccctatgtattccctacatgcacattctgtctgcagacactggctctggagtcatctcctccaggaaggcctccgactccctccacagccccttacccctctgccccctcctaggctgttccatcccccatccaagccccaaacctagaccatgtcctctgaccatcacatggtggacagtgtgctgcccccggacagcccaggagacagactgttagaggcgggcttaaggcagggggcacccagaggctaccataaggacacacttgtggggccatctcaccctcagccctctgaggacctggtgcgcatgggccacctgacggggctaaagcccctggtgctggtcaccttccagtccccagtcaacttctaccgctggaagatagagcagctgcagatccagatggaggctgcccccttccgcagcaaaggtgggcctgggggaggcgggagggatcgcaacctggcaggggtgtggggtttgctgggggcctctgtggggccatgatctgaggagggtatgtggggggcgggagctcagcacattccatggcctagaggggccacacagaggccccagtgggacccatggcgtggaggcaggtatggggagttgtggggagatcccagggtggtctggggcctggaaccggccattgggaggccccagcagtttcagtgcccagggcctccctgcagagccatgcatggcagaagaagtgtgtagcatgagctggtacacgcccatgcccatcaagaaaggcagtgtggtcatgcgtgtggacatcagcagcaatggcctggggaccttcattccagataaaaggtaccctttcccaagacgggggctggggtggactccgggggaattcctcaccccagggtccccagaggagccagtgggagatccaagggagagaatggggagaggagaggcagctacgagctgtggaacccctgacactgggacctcacctgcgcctattctgcacctgctgctaggttccagatgaatatcaacggcttcctgaagagagaccgggacaataacatccaattcactgtgggagaggaggtgagggaatatggcaggggaaaaagacaatggtctgggccttaggctgacgccctggttacttcccagacaagcagcagatcccatttagggagcaccaacttcatgccaggccccacatgaagatcccattaatctccccagtgacctgtcgaggggacgtactctcacatactccattataaagaggagaaaactgaggtcccaaagggatggaaccattttcccatagtccctcagcatggagggagtcttgaagttatctgtctgactcctatacacacctgtacatccatacctgtacatacatatatagtacatacctgtacatacatatatagtacatacctgtacatacatatatagtacatacctgtacatacatatatagtacatacctgtacatacatatatagtacatacctgtacatacatatatagtacatacctgtacatacatatatatgtatatacctgtacatgaacagacacacacacacacacacacacacacatatatatatatatatatatttttttttttttttttttttttgagacggggcctcgctctgtcatccaggctggagtgcagtggtgcaatcatggctcactgcagacttgacttcctgggctcaagcaatactcccacctcagcctcccaagtagctgggaccacgggcatgtaccaccatatccagctaatttttaaattaattatcattattattattattatttttgagacagagtcttgctgtgtcgcccaggctagagtgcagtggtacgatcttgcctcattgtaacctccacctcccaggttcaagcaattctcctgcctcagcctcccaagtagctgggattacaggcacccatcaccacgccctgctaataatttttttattttttgtagaggcaaggcctcactctgccacccaggctggagtgcaggggaacgacctcgtcaggctcaggtgatactctcacctcagtttttgtatttttagtagaggcagggttttaccatgttgccagggtggtctcaaactccggggctcaagtgatccgcctacctcggtctcccaaagtgctaggattacaggcgtgagccactgtgcccggcccatgcccatattcaattttttttttttttgagacagagtttcgctcttgttgcccaggctggagtgcagtggtgcgatctcggctcaccgcaacctctgcctcccgggtacaagcaattctcctacctcagcctcctgagtagctgggattataggcacgtgccaccacacccagctaatttttttttttttttgtatttttattagagatggggtttctccatgttggcaggctggtcttgaactcccaaccaggtgatccacctgcctcagcctcccaaagtgctgggattacaggcatgagccaccacgcctggcctcatacccatattcttaatcccgatgcattcacccattcattgatgcagtcactcagcaggcacttactgagcacacgttgttgcatcatggggacacagcagtgaacacacagacccaaatctctgccctcctggagctgacactctagtgggggagacagatggcaaaccggcaaactggtaatgtgaaaatcaagtgaattctgtagtagggtaaagggcggtaagcgctctggagagaaatggaacagggcaacgggagttgggtctgtgcagaagaagagtgcaatatttaatgggatggtcaagaaaggcctcattgaggaggttaagcttccaaggagagaattgcatggatactaagggaagagcagttcatcaggagaaacagcatttcatcaggagaaacagaggccctgaggtgggcatgttcctgggaggtctgagaagcagagaagaggccttgtggctgggagagagggaccgagggggagaatggtaaggaatgaggtcaaggaagtgagaaggacaaatcgcgtggggccttgtgggtccaggtcaggccttggacctaaatgagatggagtctcaggagagtggggagagtgttggcgtccctcctgtccctccttggcagctcttcaacctgatgccccagtactttgtgggtgtctcatcgaggcccttgtggcacactgtggaccagtcacctgtgcttatcctgggaggcattcccaatgagaagtacgtcctgatgactgacaccagcttcaaggacttctctctcgtggaggtgaacggtgtggggcagatggtgggcggggcgtcttggagggagctgggcctcagcccctgaaataaggtaggggcctggggctctagaagtccccaaagacatatctgtccccatgagaggcagatagcatgaagaaaaaacacaagattctacagccagagggcctaggttcaaaccctggttctgccacctcctggctgcctgaccctggacctggcagttcaacgacccggtcttcagattcccatttgtaacatgggagtaatatttatatttacttcataggattgttgtgaggatgatataagttaatagtttctggccgggtgcagaggctcatgcctataatcccagcactttgggaggctgaggtaggagaatcgcttgagagcaggagtttgagaccagcctggacaacatagtgagaccccatctctaccaaaaatacaaaacttagccaggggtggtggcatgagtctgtagtctcagctgctcagaaggctgaagcaggaggattgcttgagcctgggactttgaggctgcagtgagctatgatcacaccactgcacttcagcctgggagacagatcgagaccctgtctcaaaaacaaacaaacaaaaaaaactgggcgtggtagtgggcgcctgtaatcccagctactcaggaggctgaggcaggagaatggcatgaagccgggaggcggagcttgcagcgagccaagattgtgccactgcactccagcctgggcgacagagccagactccgtctcaaagaaaaacaaaaaaaaaaagttaatagcttccataaccaatggtatatatgtgccattacattctacactctggaaaattctgcattgcaatatacatctctgcccaagggtttcctattaggcattgagagcctatattatcccagaatagggagggagtgtctgaagtaaggatcttttggcttcagcgacagaactatgttggaattagtgcagctacaggagaacgccaaggcaggttggtttacccagagaactggctttaagaagtgcacccacagccggtgcagtggctcacgcctataatcccagcactttgggagaccgaggcgggtggatcacctgaggtcaggagttgcagaccagcctaggcaacatggtgaaaccctgtctctactagaagtacaaaaattagccaggcatggtggcaggcacctgtaatcccagctactctggaggctgaggctggagaatcgcttgaacctgggaggcggaagttgcagtgagccaagatcgtaccactgtactccagcctgggcgatagagcaagactctgtctcaaaaaaaaaaaaaaaaagattgccttaacctcctcccatcaaggtcaaaagccctactcacaatttctgaggatcccacgtggattagtattctcctgaccccttctggctctgaattcctgcttatgtggaatttgttcagtttgtggaccatcttcctgtcctgtgtcagctttctctgttctgagccaagtctattcagacattgtttaatttacaccaacttttttttttaagagacaggcttttgctctgttgccgaggctggagtgcactggtgtgatcatagctcactgcagcctccaactcctggacttaaacgatcctcctgcctcagcctaccaaatagctggtattacaggcatgcgccaccttacctggctaattttaaaaaattgtttgtagagacacggtctcactatgttgcccagactggtcttaaactcctgcccttaagcaatcctcccatctaggcctcctaaagtgctgggatcaccgtgcctggccaatttccacaaacttcgttttttttttttgtttttttttttttgagatggaatttcactcttgttgcccaggctggagtgcaatggtgtgatctcagctcactgcaacctccaccccccgggttcaagtgattctcctgcctcagcctcccaagtagctaggattacaggcatgcaccaccacacccagctaattttgtatttttagtacagatggggtttcactatgttggccaggctggtctcgaactcctgacctcaagtgatccacccgcctcagcctcccaaagtgctggtattacaggtgtgagccatcgcacctggtcatagagaaggtgtttatattcacaggaatgaaaacaagttcaatgtgaattcaggcatccaaattcttgttccttattttttttaacttgttgaagtgaaatccataaatttaaccattttaaagtgaacatcagtggcatctagttcattcacaatattatgcaaccaccaccactatctacttccaaaaaatttccatcactccaaaataaaccctgggtttgtttttatttcatgtcagacaggtaatgggccgacaccataacaaggcttgagggagacacatctcagatgacggtgaaaacccaatcgccacacgtagaaactacaagaagatcctatgatcctgttttagttctttttcttttttttctttttgtcatggtctcactttcttacccaggctggagttcagtgatgcaatcttggctcactgcagcctccatctcctgggttcaagccatcctcctacctgagcctccctagtagctgggactacaggcgcatatcaccatgcctggctaatttttgtatttttggtaaagatggggttttgccatgttgcccagcttggtcttgaactcctgacctcaagccatcctcctgcgttggcctcccaaagtgctgtgattacaggcatgagccaccgtgcccagccttgttcttgttctctaaccaaggagatttctccctgatggcctcatctgtttgtctcctctcttccctgctcctgtctctctccaccactcccttccacactgcccccaggaaacgaatcctcccctggctcatggttggggtccaggtatagatgctgtaacaaagagaccctggaagggaattacttaaacagagactgttgctcattgtttttttttgtttgtttgtttgtttgtttgtttgttttttgagacagagtctcgctctgttgcccaggctggagtgcagtggcataatcttggcttactgcaacctctgcctcccaggttcaagtgattcttctgcctcagcctcccgaggagctgggattacagccacccaccaccacacctggctgatttttgtatttttagtagagatggggttttgccatgttggccaggctggtcccgaactcctgacctcaaatgatctgcccgccttggcctcccaaagtgttgggattacaggtgtgagccaccgcacccggccgttgctcattctcgtaacagtctggagatgaggaaccttgttccttccattttctctcttcaccatcccctgggctcaaggtgttggcctctgtatgatggcagccactgggaaaggggaggagcagaagtagagggcaagccattttcttttaagcaaacttcacttccactgacattccactagtgagaaggggtcacctggctacatccaactgcaagggacactgggtggtacatgcccagctaaactcaatcaccaaaaaatatggggaaatggatttgagagctttactagccatctcctaaaagtggagaagaaaatttattggttcacgagaccagatttcaaacagtatcactgagacggggtttctcgcctcatctcttggaccacattcctctgttttttgtttgtttgcttgctttttgagacggagtttcgctcttgtcacccaggctggagtgcagtggtgcaatcttggctcattacaacttttgcctcctgggttcaagcgattctcttgcctcagcctcccaagtagttgggattacaggcacgtgtcaccacgtccagccaatattttgtatttttagtagagatgggatttcaccatgttagccaggctggttttgaactcctggcctcaagcaatccacctgtctaagcctccaaagtgctaggattacaggcactcggccacattcctctgtattgacttgatgctcaaaacagtcctgttggctgggtgtggtggctcaggcctgtaatcccaacattttgggaagccaaggtgagcagatcacttgagcctacgagttcgagaccagcctggccaacatggtgaaaccccgtctctactaaaaatacaaaaattagccaggcatggtggtgggcacctgtaatccgagctactcgggaggctgaggcaagataatcgctggaacccgggaggcagaggttgcagtcagccaggattgtgccactgcactccaacctgggtgacagagtgagatcctatctcaaaaaacaaacaaacaaaaaatggtcctgttttctggaactgaagactacagaggctgcatcttctcaagcccacattcagtgggaaagatctttcccaagaatcaccacatccccaaagtcacaagattccttccacttggtacagctcaggtccctaccaccccaacaaagccaacacaatcaccatgcccaacatgatgcctagtgaattaaatgagtcagaactttccaatgaggctgaggcgggaggactgcttgaagccaggagttcaagaccagggcaatgtagcaagactcccgtctacacagttatttatttattttaattagctgggaggccgggtgcggtggcttacgcctgtaatcccagcactttgggaggccgaggtgggcggatcacgaggtcaggagatcgagaccatcctggctaacatggtgaaaccctgtctctactaaaaatacaaaaaattagccaggcttggtggtaggtgcctgtagtcccagctactcgggaagctgaggcaggagaatggcgtgaacccgggaggcggagcttgcagtgagccaagatcacgccactgcactccagcctgggtgacagagcaagactccgcctcaaaaaaaaaaaaaaattagctgggaatggtggcaagcacctgtagttccagctactcgggaggctgaggcgggaggattgcttgagcacaggagttcaagaccagcctgggtaacatagcgagacctcacctctacaaaaataaaaattaaaaaattagctaggcatggtggtgagcacctctcttgccagctactcgggagactgaggtgggaggatcgttcgagcccaggagtttgaagctgcagtgagctatgatcataccactccagcctgggtgacagagccagatccagcctttaaaaaaaatgtcccttggggcgagcatggggtgttgtatccatgtaggtataacactgactgtagccaagggcacaaggaccgctaaggaccgttgagcatgctgtgcactgcccaactccagggggcacacgaagcctgaactggctcaggcctgggtcacctgcttctctggtccatatgggggaggtttggctaccaaggtgctgctgcggggtgagcagggagagcgccctggggcagctacatgtgtccctcccaagcagctgtcagagcaggagcttccccgcaaggcaggacatgggggctgaggccaaggccacctgctcaccactagcctctgctcccctgcagctgagcattgacagttgctgggtgggctccttctactgcccccattctggcttcacagccaccatctatgacactattgccaccgagagcaccctcttcattcggcagaaccagctggtctactattttacaggcacctataccacactctatgagagaaaccgcggcagtggtgagtgtgctgtggctggacccacgcctggggagggcaccctggtgaacccctccactgaaggtggctgggggctggaattgctgtgggtgaggcattggggaaggaacttgccaaggccccaaatcacccttgcccaccccgaatgggccttgccttgcccttttttttttttttttttttttttgctgggatgaggcttccacccagaccctcctgggaattgtgagcagctgtgagaagagggggtgcgagagtaaagggaggtagagagaggcagacccacgcgtgtgcccacacacagtggcagaaggacttgccaagacagaccagacggggagagaaagtcagagggagaggggcatggcaaatcagaaagacagagcgggaggagagagagaaacagatgggcaaagcctcaagggaaactcattggagaggaaaaaagagagtctaggcacagtggctcaggaggccagactattcaagaggctgacgggagggggcatcgcatgagcccaggggtttgaggctgcagtgagctatgatcacaccactgcactccagcctgggcgacagagcaagaccctgtttcaaaaaaaaaaaaaaaaaaaaaaaaagctgggcatggtggctcatgcctgtaatcctagcactttgggaggccgaggcgggtggatcacttgaggtcaggagttcaaggccagcctgaccaacctggtgaaaccccatctctgctaaaaatacaaaaattagccgggcattgtggtgggcacctgttattccagctactcaggaggctgagaaaggagaattgcttgaacccaggaagcagagcttgcagtgagctgagttcacgtcactgcactccagcctggccaacagagcgagactcagtttaaaaaaaagagagaggaaaaagcgagagagatgaaaaagagagactattcaacttaatctttaaatgataccgtggctgggtgcagtagctcacacctgtaatcccagcactttgggaggctgaggcaggtagatcacatggtcaggagttcgagaccagcctggctaacatggtgaaaccccgtctctactaaaaatacagaaaattagcaaaattagctgggcgtggtggcacatgcctgtagtcccagctactcgggaggctgaggcaggagaatcgcttgaacccgggaggcggagcttgcagtgagctgagatcgtgccactgcactccagcctgggcgacagagcgagatgccatctcaaaaaaaaaaaaaaaaaagaaaaaggccaggcgcggtggctcacgcctgtaatcccagcgctttgggagggcggatcacgaggtcaggagtttgagaccagcctggccaatatggtgaaaccccgtctctactaaaaatacaaaaattagctgggtgtggtggcatgtgcctgtactcccagcttctcaggaggctgaggcagaagaattgcttgaacccaggaggcggggctgcagtgagccaagatcgtgccactgcactccagcctgggcgacagagtaagactctgtctcaaaaaaaaaaaaaaaaaaaaaaaaaaaagataccaaagctctcttatttcttccagtttctcccgccatctcagtgagaactgtcagcttacagagtcactggaaattggactgtaacttacatttcataagtgaatgcgtgttcccagcagctttgcttagtctctttcttactttgggcattttgacagtgggaggaaccaaattcaaattggcttaatccaaagaaaagtggtgtttattggcttccgtggctgaaaagcccaggagcatgttggtttcaggaaaggctgcaccatggggtcactgtcacggttagacagtcacctccttgtgcatgccacggtgattcaggcctctacgcagcaactgtagacttttatgcccctcagtagccccagaaaagagcatcttgttgcggattgcaagctgatattgcctctgatttggccggcttggtcacatgctaatcattgtggcctagggagtgcaagggaggtgtcagcccaatctgaccctcatggacagagtgtgagcaaggaggattttctcaaaggcagcgggtgccctctgccaggtgctccctgacaccacactgaacgggtgcttcagcatgagaggacagataacaggctcactaaagccagggaaatgtgggcagggggcagaggccccagatccaaccacctgggtctgaggccccatactgacttcactaggcagttggattcgtgtcctggccagcgagtgcatcaagaagctgtgccctgtgtatttccatagcaatggctctgagtacataatggccctcaccacgggcaagcatgagggttatgtacacttcgggaccatcagaggtaagggtgtgggcctctgtcagccccagggacccctccataccctctctcacctccgagaattctaaccttgggccctcactcattaccatgtgccctgaggagggcccctaggctgagggtgatggtggtggtggagggatgcgtttgtaggggtagggcttgggggtatgttatgtatctttcatgatgtacttggttttaaagggcagaagagctgggcacagtggctcatgcctgtaatcccagcactttgggaggctgaggcaggcggatcacttgaggtcaggagttcaagaacatcctggccaacatggtgaaaccccatctctactaaaaataaaaaaattagttgggcgtggtggcaggcgcctgtaatcccagctattcaggaggctgaggcaggagagtcacttgaacccaggagatgaaggttgcagtgagccgagattgcaccactgcactccagcctgggcaacagagtgagactctgtctcaaaaacgaacaaacaaatcccccaaaaaaacaaaaatagcagaagcccaattcaaaaataattgaagtacagctgggcacagtggctcatgcctgtaatcccagcactttgggaggctgaggtgggtggatcacctgaggtcaggagttcgagaccagcctggccaacatggcgaaaccccatctctactaaaagtacaaaaatcagctgagcatggtggcatgcacctgtagtcccagctacttgggaggctgaggcatgagaattgctcgaacctgggaagcggaggttgcagtaagccaagatcatgccactgcactccagcctgggcaacagagtgagactgtcttaataataatgatagtaataataataataacttaagcacaaagaatttgtggacttacataaatgaaaagactacggttcaacttcaggtatggctggatccaggggcccacagggtaggtcatcaggactccatctcttggtaaggtagtgcagcatagtaattaattatagcacagattctggagagagactgctccatcacaccttcgctgtgtgcctctcgatatgtaacttgacctctctgatctcgttttcttcacctacaaaatgtggctaatggtagtactagcatctaggtcaccgggttgatataaagattaaataagttggtttttgtaaaggtcttagtgctagtgatgtggtgagtgttacaaacagtttattattattggtcctataatttgggtccatttttaggtagctattcctccatggaggttaaaggtggccccttaaagcttcagactcaagtcacctactagtctgagtcacgccaagagaatgaagacagcatctttcccattaattctaacacaaatcccagagtaaactctgatcggcccaccgtgggtcacatggccagacctgaggcatgagacccacagtctcatgactgtgaccaaagacagacatgctctgataggccaggtgtgagtgacgaaaggccagagaatgagatcccaaggacggaggggctggtgggcataaggagggcaatcggagttggcttgatgggctgccagacaggagggagagggcctgaacatgaacccgaccttgctctgcagatggccaggtgtcctttgagatgctgcccaggcagtggtctgtgtgcgagcagataggaggtactcattaccccgatgggtctgcggtgggaggctgggggaactgaggatgcagaagagcaggggagggtggcaggggtcatgggaaagaatgggcagtgtcttagggaggggtgagttatggggaggggtacagctggcacaggaccaaggctattgagccctggggcggctctggactgcccctttccctctcagttaccacctgctccataatttggtctgaatacatcgcgggtgagtatactctactgctgctggtggagagtggatatggtaatgcaagtaaacgtttccaggtggtcagctacaacacaggtaatgagggtgatgcaaggggctgggcacaaaggggcaggatcccagactgtggactgcatgcccatcctgagggatctgtgcccagcagacagagggagggcaacattacctgtgtcactcctggttgaggagtagcagtggagaacaggatataggcttggtgatctgaaagggccctgtggctcacaataaagagattttattttacctgcagtgagaatagggcccctatgtagatttgtgcaggctgtgcagtgcacaaaacccccaaccgaggggtcagaggagacaggtcctgtgccttaacaggactgtttcctctcaggcagtgcctttttataattcacatgaagaaattctaaagggctaggcaaggggctcacacctgtaatcccagcactttgggaggccaaggccagaggatcccttgaggccaggagttcaagaccagcctggggcaacatggcaagaggctgtctctacaaattaaaaaaaaaaaaaaaaaaaaagtagctgagtatggagtcgcacctgtagtcccagctacttggaatatacctgaggtgggaggatagcataagcccaggaggttgaggctacagtgagctatgatcatgctactacctgggtgacagagcaagacccggtctcaaaaaaaaaaaaagagcagagccaggcgtggtggctcgtgcttataatcctggcactttgggacaccaaggtgggtggaatgcttgagctcaggcgttcaagaccagcctaggcaatatagcgaaacctcatctctactaaaaatacaaaaattggccgggcacggcggctcacgcctgtaatcccagcactctgggaggccgaggcggggggatcacctaaggtcaggagttcaagaccagcctgactaacatggtgaaaccctgtctctactaaaaatacaaaaattagtcgggcatgatggtgggtacctataaacccagcaactcaggaggctgaggtggaagaatcacttgaacctgggaggcagaggttgcagtgagctgagatcatgccattgcactgcagcctgggcaacagagcgagactccatctcgaaaaaaaaaaaaattagctgggcatggtggtggtgtgcgcctataatcccagctactccataggctgaggtgggaggatcacttgaaccgaggaggcagaagttgcagtgagctgagatcacaccactgcactccagcctgggcgacagggagatcctgtctcaggggggaaataaaagaaaagaaactctaaggactagcaaacccgagtgggaagctctttggagggttttacaggaggctgagaagcaaacaacttgctccagctccaggttttgaaagtgcagggcctcaggagattttgctgtgttctccccacctgtagctagtgatgacctggaacttctctaccacatcccagaattcatccctgaaggtaggaagggaaggcagacgtggcctcagggtggctgtgggccaggaggggcccaggtgactccacttcactgctgtgtcctctcttcctctgctccggtcagctcgaggattggagttcctgatgatcctagggacagagtcctacaccagcactgcaatggcccccaagggcatcttctgtaacccgtacaacaatctgatcttcatctggggcaacttcctcctgcagaggtgggcctctaccacccctgggtgggccaggcatactctgtctccccagcaactttacggtggggaccctttcaagcccaggctaggcaagtctcaccaagccttcaaaggatgcacaaatccagaagttaccaggactgtgatgaggaacacaccgttagggtagtcagtgctgggatgggggaagccaatgttttaaagctgtgggagcccttttcttaaaatgaaaccttatataaagacccagcctgtgtgagcaatagatgagcagtttctagggtttttttttgtttttgtttttgttttgggacagagtctcactctgtcacccaggctacaggacagtggcaaaatctcggctcactgcagcccccgcctcccagattcaagcgattctcctgcatcagactcccgagtagctgggattacagctgcatgccaccatgcctggctaatttttgtatttttagtagagacgcggtttcaccatgttgggcaggctggtctcaaactcttgacctcaggtgatcctcctgcctcagcctccgagagtgctgggattacaggtgtgaaccaccatgcccggctaattgacaaacattttctagggacagtttaggatcctccccaccccagccaccctctcgaccctcaggaacctaggggcccctgagccaccttcttgggtggctggcaaactgccaggttggcccaatgctcctgttttacagatggggagctgaagattctcaaagggtttggggtggggggcgggagctaggatttcaagcttcctttgcatgttcttacaagtggagaaacagtaagtggctcccgtgttattaggcctgggattgggggaagcggctgtccagcatgcgcctagctctccatctctgtccctgcagctctaacaaggaaaacttcatctacctggcagacttccccaaggaactgtccatcaaatacatggccagatcgttccgtggggctgtggctattgtcacagagacggaggaggtgggctgccccgcccctctccccgttccctctctgcccacccccaaaccccaggggcccctctttcccccgtcacagtaaaggagccaagggaagggggcaccctcggggaccctgagaaagggcagtgaagctccatttataactgaaactcctggaactcagggtaagtgtcagctccaaagtcacgcagaccggagctatgatccgatgttcagaggcggccctctttcatcccacagtgtggtcgttcacttcataaatattgagcatttactgtgtgcctgcccccgtgctggagaacacagagtgatcagggctgcaatggggaaaatattacctatggaagcagggggacctggccccgtctgggggcttgtgcatgtcagggagggcttcatgggggagaccacatggagggggacatcttggaggctggaggggatcccccaggttgtggctcaggaaggggagtgaaggttcccttcagatgtgtatgggggtgggcatcagtgcagagatgggaaactgaggccagggaaatggtgagaccctggaagctgcaaagagtgagaagaaaagaggtctcggctctaggaaccgtggctgttagggagtgtgtgtgttagagatgcttaggtcgcaagtgccagaaacccaaacagaccgaaaacattgaaaaaagtgatcatagtgtgtgagggctggaaccagaggtgattgggctcagggaagtagagccgtggcaccacagagaaaaggaaggggagcgcccttggtcccagtggaggtgagtttccaaacttcatccctcaaacaatggggccaccacactgggcagagggtgaggtgggatcagaggaccccatggtcctgacacacacacatccggctgtcatacccgcagatctggtacctcctggagggcagctaccgggtctaccagctgttcccttccaagggctggcaggtgcacatcagcttaaagctgatgcaacagtcctctctctacgcatccaatgagaccatgctgaccctcttctacgaagacagcaaactgtaccaggtgcccggtggagctatgcggggacatcggggcaccccaggagggctgaccccagctcacctggccctgccttccccctgcagctggtgtaccttatgaacaaccagaagggccagctggtcaagaggctcgtgcccgtggagcagcttctgatgtatcaacagcacaccagccactatgacttggagcggaaagggtgagaagacaccggaccatgacaggggtctgagggctcccggcactgccctcctgaagctaccattcttgagagaggggagaccgagctaaccccagtgaaaacctcagggctatgatggcaggagttcagcacttatggaagctcagaggaggagcccaacctagtggggggaaggtgcatcagggagggcttcaaggaggaggaggtgtatgcactgtggcaagaagggtgaggaaggattagccaagtgataaggtggggaagggtgttccagaaagggggaaccacctgtgcagaggccctgatgggagggggacaaagtgagcctggtggtcatggggagaaacttgggcttcatcttgagggtcttgggagagccatggatgggactaagggaaaggactgcaggatcggattttaccgcgtgccgtaatgatgcctccggtcatcgtcctgcggagggtggatcagagcaacccagggaggcagctggagtcgggacagggaaggggcgctggggtggaaggaggaagcaggagatggaataaagataagaggtcaagtggacaggcagatggcgactgcccgttgagtagggaggactctggtctcagggatcaagggagggacgtccgaggggatgtgtgcagaggcctctgggcagcaggggctgacgctgaggaggaagattcgggctggattcgatacgggaagtgggtggggtgggaaagaggcctgcggaagcttccagtgcgcggggtgccttagagccagcagcctttcccccttgccactgcccaggggctacttgatgctctccttcatcgacttctgccccttctcggtgatgcgcctgcggagcctgcccagtccgcagagatacacgcgccaggagcgctaccgggcgcggccgccgcgcgtcctggagcgctcgggcttccacaacgagaactcgctcgccatctaccagggcctggtctactacctgctgtggctgcactccgtgtacgacaaggtgggcgtccggcggcgggcgggcaggcctgagacgggactggggcagccgggagctggcttagagggcgaggcctgtggagcggagcgcagcgggattggagaacaggactggtggtgggtgggcgggggacctgggggcggggcctggcttgagcaggacttccaggggaaggcgttgggggtgtggccgggttgaaagcagggtttggggatgggctggggtgtgtatcttctgctctgggttgggggctggctttgaggctaggaggtggtctggggatgccgcttgcctggaggctctcgccccgctgcccaatcccttcacggtgccgggcgatccctgcagccgtacgcggacccggtgcacgaccccacctggcgctggtgggcgaacaacaaacaagaccaggtaggcggagcggattgggagccgggaaaggggcggcgcccggacacccctcaccgtgccccacccccggcgctgactctgccccgcgcatccggtaccccaggattactacttcttcttggcgagcaattggcgaagcgcgggcggcgtgtccatagaaatggacagctacgaaaagatctacaacctcgagtccgcgtacgagctgccggagcgcattttcctggacaagggcactgagtacagcttcgccatcttcctgtcggcgcagggccactcgttccggacgcagtcagaactcggtctgcgcgggaccagagtggagcccgaagggcggggcgagggctaccagaatctgggagcctggggggcggggacaccatcggaggggcggggcctgtctgtgagggaggccttaaccccgtttactgcccggagcaggcaccgccttccagctgcatagccaggtggacgtgggcgtggtgctggccgaccccggctgcatcgaggcctcggtgaagcaggaggtcctgattaatcgcaactcggtgctattttcggtgaggccccccggggagttgggatcaagggaggttttgttttttttttttttttttttttttggagacagggtcttgctctgtcgctcaggctggagtgccagtggagcgatcactgcattcttggcctcctgggctcaagcgatcctcctccctcaacctcctgagtagctgggactgcaggcacgcaccacagtgcccagtgaactttttgtttttcttttgagacggagtcttgctcagtcgcccaggctggagtgcaatggcacgatctcggctcactgtaacctctgcctcccagattcaaccgagtctcctgcctcagcctccctagtagctgagattacaggtgcatgccactacacccagctaattttttgtattattagtagcgatggggttttaccatgttggccaggctagtcttgaactcctgacctcaaataatctgcccactttggcctcccaaagtgctgggattacaagcgtgagccactgcacccagccttaactttttattttttgtagagacgggggtctccctatgttgcccaggctggcctcgaattcctggactcaagagatcctcatgcctcggcgtgaggtgtgaggtgtgaggcatgaaccaccctgtgcttggccccgttagcctattccttttttttttttttttttttattgatcattcttgggtgtttctaggacaatagtggagggaaggtcagcagataaacaagtgaacaaaggtctctggttttcctaggcagaggaccctggggccttccgcagtgtttgtgtccctgggtacttgagattagggagtggtgatgactcttaacgagcatgctgccttcaagcatctgtttaacaaagcacatcttgcaccgcccttaatccatttaaccctgagtggacacagcacatgtttcagagagcacagggttgggggtaaggtcacagatcaacaggatcccaaggcagaagaatttttcccagtacaaaacaaaatgaaaagtctcccatgtctacttctttctacacagacacggcaaccatccgatttctcaatcttttccccacccttccccgctttccactccacaaaaccgccattgtcatcatggcccgttctcaatgagctgttgggcatacctcccagacggggtggtggccgggcagaggggctccccacttcccagcaggggcggccgggcagaggtgcccctcacctcccggacggggcagctggccgggcggggggctgacccccccacctccctcccggacggggcggctggcctggcgggggctgacccccacctccctccaggacggggtggctgccgggcggagacgctcctcacttcccagacagggtggctgccgggcggaggggctcctcatttctcagacggggcggttgccaggcggagggtctcctcacttctcagacagggcggctgggcagagacgctcctcacctcccagatggggtcgcgaccggacagaggcgctcctcacatcccagacggggcagcggggcagaggcactccccacatctcagacgatgggcggccgggcagagacgctcctcactttccagagtgggcagccaggcagaggggctcctcacgtcccagacgatgggcagccaggcagagacactcctcacttcccagacggggtggcggccgggcagaggctgcactcttggcactttgggaggccaaggcaggcggctgggaggcggaggttgtagcaagccgagatcacgccactgcactccagcctggacaccattgagcactgagtgaaccagactccgtctgcaatcccggcacctcgggaggccgaggctggcggatcactcgcggttaggagctggagaccagcccggccaacaccccgttagcctattcctgagtagaaaatggcagccttccgttttcctaccagccaccacctcgccccagctatgggttatttgaactgtttgttggactttggggagacctgttcaccccttcatttctgcctctcccctccttcaaccccagattacgctcaaggataaaaagctttgctatgaccaaggcattagtggacatcaccttatggagacttccatgacggtcaatgtgaggtccaagcctggaggggagggtgcaggatggtgggaaagcctgggccggcggggatcaccatcttcacctgctcctacccacaggtggtgggttcatccgggctctgcttccaggaaacacacctggggccccatatgcaagtattggagcttgggatactgggccctgggaggggaaggttggggtcgggtctcaacagggctaatccccctgagaatcccactaatgcattcataatttcctttcttctcattctttctcaacattcatccacccacccactaccacccactaactcctttcattcttttttctttaagacggagtttcactcttgttgcccaggctggagtgcggcggcgcggtcttggctcactttgcctccttggctcaagtgattctcctgcctcagcctcccaagtagctgggattataggcgcccgccaccacggctggctaattttttgtatttttagtggagacagagtttttccatgttggccaggatggtcacaaactcctaaactcaaatgatccacccgcctcagcctcccaaagtgctgggattccaggtgtgagccaccatgcccggcctaactcctttcattcattcacgttttcagaaagggccaccttcccagttgtgcaggttgcacacaaactggtatgttccctctgataacttttcttcagagggagaatagagtgagcaacagggccgttttttttttgttttttgttttttttttaacgatgtctcactcttgtcccccaggctggagtgcaatggtgcaatctcggctcactgcaacctccacctcccgggttcaagcgattctcctgcctcagcctcccaagtagctgggattacagttgcataccaccatgcctagctaattttttatattttaaatagagacggagtttcaccatgttggccaggctggtcttgaactcctaacctcaggtgatctgccggccttggcctcccaaagtgctgggattacaggtgtgagccaccgtgcccgacctagggccactttttgcaattggcacaaaggtggcataagggctggcctggccctgctttcacatctctctcttcttctgcccactcacacattcctcattcagttctttgggtgcttggtgcttcacttgcttatacacgtgatatcgcctttgcccggggcagacactgaggctcagagaggtgcagagtaacccagggagctaataagtggtagaggaggggcgtgccccagagttcttgttctcacccatttccctacccactccctggcatgcagatcctggtgttcctccctcctggcttagaatgaccttgggcagtcaaaaggggttgtaacagcccccacctccttagagtacatgagatttcatgtgctagactgaataaacaaggaggaagtgtgattgcatcagggtgggcaagggggaacgtggtgggatgagctcggagcagtgatggggcagagtaagcggagcccttatgggccatggtatgtgagctggctcctcgggagggctctaagcagaggagggactcgggtgtccccagggcccatctggctgcatggggtggggggacatcaatgaggggactggaagcagggagactctggaagagacaaggttggacaaaacagggtgggggcaaaggagttggaggtttaggggagagaacaggcaggctctcggtctttttttttttttttttgagacagagtcctgctctgtcacccaggctggagtgcagtggtgcagtcttggcctctacctccctggttcaagcgattctccagcctctgcctcccgagtagctgggattacaggcatgcaccaccacacacccagctaattttttgtatttttagtagagacagggttttactgtgctggccaggctagtctcgaactcctggactcaagtgatcagcccgcctcggcctcccgaagttctgggattacaggcatgagccactgcaccaggccgtgttaatgatattaatgaccatattgcccttgggggtgagggagagccaggcagctggtggtggtgtttgtgggagggggactgtccttcctgccccttacccctccaggggcctgaggagaccctggccacccctgtgagccttttttcctcccaccgagggcaacctgatggtgccagtgttcattggctgccccccaggcaagcgcctggccttcgacatcacctacacgctggaatacagccgcctgaagaacaaacactactttgactgcgttaacgtgaacccggagatgccctgctttctcttccgggacagtgtgtgtccagtcccttcccctgcacagttcactgccctcttgcccccactactttgtgctctccctccccattcctctccccgcagactacccaccctttttcctgcggcatctcactttcccccgtctcggtcctcagcttctcgggccaagctaatttcttcttctggtctcaatcccctccaaccccatagttttctaccccttcttcttgattcaagatttggtgacaggagactccggcagtttccagggcaggtaaaggcgtggccagcttgcagctagggcaggtggagggagtggaaggagatgggtgcaggactcgagacccggaggccagtctgtgtgcacttctgtccctggtagctatgttctgctggtggtgggtggcgggcccacactggacagcctcaaggactacagtgaggacgaaatctaccgcttcaacagccccctggacaagtaatccccgtggggtcccacgtgtaatccaccttgcttcccctggaggcctttcccacttccaagccaagcccacctcgcaagcccccacctctgcgtctcaggccctgcccacagtggggctcttaggatctcacaggcaaactcctgcccgcccctaacaccatgtcccctgcacccacctgtggcctccctccacactgaccactgaggtcatacctcccctacaccgccccccaacccctggctgagatgacctgggcctgcacaggaccaacagccttatctggaccacgaggaccacaaggaccaccaaagactcagcctttcacatcatgtcccacgagagcccaggcatcgagtgagtgcgtagcctggcccctcttggcccccatctgtcggtagtccattgggcccacctatcctttctgcccctaggaggcctcttgatccccaagtcacactgactgcctttgtgttacttaaatggggctgaactttgcacaagctgaagtctctgcctggaatgctgctccctccgactcttttcaggccttaggcagatgccccttcagccaggaggacttttctgtttcaagatgggacaattgtcccttcatggctcctatggcctcttggggctctcccatcctggccctgagccccctacctgtgcgtccccatcccagagtggacagctctgggcagtcactgtctggtgtggggtctgtctctcctccagaactgggtcctgaatagactcataaatttgtttttatttttgagatggagttttgctctttgttgcccaggctggaatgcagtggcaagatctcagctcactgcaacctccaccttccaggttcaagcgattctcctgtctcagcctcctgtttattttttgagacaggctccctctgtggcccaccaggctggagtgcagtggcacaatctcagctcactgcagcctctgcctcctgggttcaagcaattctcctgcctcagcctcccaagtagctgggattacaggcacccgccaccatgcctggctaatttttgtatttttagtagggatggggtttcaccacgttggtcaggctgatcttgaactcctgacctcaggtgatccgcctgcctcagcctcccaaagtactgggattacaggcacatgccaccatgcccggttaatttttgtatttttttttctagtagagacggggtttcaccatgttggccaggctggttaacatagcatgtattgaatgaaagaatgaacaaatgaataaatcaattcgtggcaggcatttattgatatctgaatgggggtattaatgaatgaataaaacaatggagaaacaaattcatatataggggctcagtaagtttcattcaatgaaaggaaaaaaatgaagccatgagcaaatgaaggcagtgaatgaacgaacaacttgcacctagtcagaatttaacctgctttattttttatttttatttatttttttgagacagagtcttgctccgtcacccaggctggagtgcagtagtacaatctcagctcactgcaacctctgcctcttgggttcaagtaattctcccaactcagcctcctgtgtagctgggattacaggtgcatgccaccatgccccgctaatttttgtattttttgtagagacggggtttcaccatattggtcagtctggtcttgaactcctgacctcaagtgatccacctgcctcggcctcccaaagtgctggtattataggtgtgaaccactatgcctggcctaacctgcatttattggataatgaataaagaagggaataaatgaaagatgtgactttgtacctagtaagtgctcaagctatatttatgggataaaggaatgcaagcagcaaagaatgaataaggatttggcatatgatagatacacagcctgtaatctggatggatgcacagtgacagaggaattgacagatggaggtgtgaaggcaggaggaaatgaatgagtagacaacctgtggcacagtaggcgttcagtcagcatgaatgaatgagtgaatgaaggaatgaatgagggaaggcatgagattgcacccatttggtcctcaccgaaaacattgggtggaggaagaaattgggagttggcacagactaggcatggttggtagcacaactgcctgatctttggcttgcaggtggctctgtctggagaatgccccatgctatgacaatgttccccaaggcatctttgcccctgaattcttcttcaaggtgttggtgagcaataggtgagccaggcaagtggcccaggtgcgggtcaggggctgcccatggaatgcctggcttctcctctaatcctggatcccctcccaacccctgcagaggagtggacacgagcacctactgcaactaccagctcaccttcctgctgcacatccacgggctgccactcagtcccaagcgggcccttttcatcatcatggtgagtggctgtccgggagctgccctactgggtgggcaggggcccacgcctccatacctatgcttgttataccttcgctcattcattcctttattcactcatctagccatgctgactgaacgcctgccatgccacaggctgtctactcattcatttcctcctgctgtcatgcctccatctgtcaatttccctgtcactgtggatgcagattgtggactgtgtaccttatcatgtgccaactccttactcattctttgctccctgcaggtgtcagctagcgtgtttgtgggcctggtgatcttctacatcgccttctgcctcctgtggcccctcgtggtgaagggctgcacgatgatccggtggaagataaacaacctcattgcctcagaatcctactacacctacgcctccatttccggaatctcgagcatgccgtctctgagacattccaggatgggctccatgttcagctccaggatgacagaggacagggctgaacccaaggaagccgtggagagacagttgatgacctgagtgtcccacctgccccagcccccagttactgtcacgcctctcttatgaggcccatcttgaagatgcaacctgtcacccagcccaggcctctctttctgttttgcttgatgtttacttctcgttcagactcaaataaagccttttttcaggaccagcagtgggctctcttaaaagctcgagttcagaaggtttgtaccagcatagctgcacattaaaatatcataaacctggctgggcatggtggttcatgccggtaatcccagcacttcgggagatcgaaggaggcagatcacttaaggtcaggagtttgagaccaccctggcccacatggtgaaaactcgtaaccctgtctctactacaaatacaaaaaattagctgggcatggtggtgcgtacctgtaattccagctacttgggaagctgagacaggataatcccttgaacctgggaggcagaagttgccgtgagccaagattgcgccactgcactccagtctgggcaacagaccaagactccgactcaacaaaacaaaacaataaataaaatatcaaaaaccttctaggccacctgttaaatagtggcttctctgtgtgcctgttggctgagcctctccccagtgtaccccagacctccctgtggtccagcaggatcctccacaatccaggcccattgctatggccgaccatctgttctgattgttcagtgttaaatattctgaatgtcaacacctatctaatgtcttaaggaggggaccctggagacgtcaggattcttattttagttgcaagtagcaaatatttccctcaaatggtctacatgaaaatggtaatttacaggcttcaggtacagtttgatccaaagtcccaaggtccacaggattcagccttcatttctctgtagttttttcttctctgtcctcctcagagtgcagtctctgacctcaggacaactcccctcaccatctgaggctagttatacagtccataatctggatggatgcgtagtgaccaatgaattgacaagatggaggaatgaaggcaggaggaaataaatgagtaaaaaaataccctgttgcatggtaggcatttggtcagcattaatagatgaatgaatgaaggagcgaatgaggaaaggtatgagattgcacctagttggtgctcacccagagtgttgggttggaggaatacattggggttggcattgactaggcatggttggtagcacaaaaacctgatgaaatttgacaataacaagagttggcaacactcatgtgtgtaagggctgctggctaaggttgtttccaccaccaagattctaccgagtcacctcatggtccaggtgaacacatcataatcctgtatcagccaagtcaacatgttatttaaatatcaccatctgcacttccagccaagatagagtgacagagactggatttcccctcatacttgaaactatttatgttttttgagatggagtctcgctctgttacccaggctggagtgcagtggtgtgatctcggctcactgcaacctccgcctcctgggttcgagcgattctcctgcctcagcctcctgagtagctgggactacagacgcatgccactatgcccggctaattttttgtatttttagtagagacggggtttcactgtgttagccagactggtctccatctcctgacctcgtgatctgcccgcctcagcctcccgaagtgctgggattacaggcatgagccacctggcctggccatatcaacgtggtattttgtttatttgtgtctttttctttttttttttgagatggagttttgctcgttgcctaggctggagtgcaatggtgcgatcttggctcactgcaacctccacctcccaagttcaagtgattctcctgcctcagcctcccgagtgagtaactgggattgcaggcacccgccaccatacctggatagataattttttgtatagtagagacggagtttcaccatgttggctaggctggtctcaaactcctgacctcaggtgatccatccacttcagcctcccaaagtgctgagattacagacttgagccaccacacccggccatcatttttgtttaaaacattttttaccaccacaacttctttcacatattaatttactcattaattcaacacatatataatttctttctttttctttttttcttttttctttttttttttttgagcacagtctcgctctgtcacccaggcaggagtgcaatggcgatctcagttcactgcaacctctgcctcccgggttcaagtgcttctcctgcctcagcctcccaagtagctgtactacagatgtgcaccaccacgcccggcaaatttttggtatttttacatttatttatttattttctctgagacagagtctcactctgtcacccaggctggagtgcagcggcacaatctcagctcactacaagctgacctcctgggtttaagcgattctcctgcctcgggctcctgagtatctgggattacaggtgtgtgccaccacgcacagctggtttttttgttttttttttttggtatttgcagtacagatggggtttcgccatgttggccaggttggtctcgaactcctgacctcaagtgatctatctgcctcggcttcccaaagtgctgggattacaggcatgagccaccatgcctggccaacaaatatttattgactgtctactaatatttgccaagcactgagatactgggaattcagtagtgaaggaaatcgtcctgccttcatggagatgacattctaaatggtggagacggagagtgaaagtcgggtttgagaaaaacgtgctgcccaggcgcagtggctcacacctctaatcccaacactttgcgaggtcaaggcaggaatatcgcttgagctcaggagttcgagaccagcctgggcagtataatgagactctgtctctataaaaaatttaattttttttaaaaagagagaaaaagcgatgttgaatgtgcagatgtaatatcaatcagtggaggaagaagttggtataagaagttgtgaatactggccaggcaaggtggctcatgcctgtaatcccagcatttcgggaggccagggcccagggaatcgcctgagttcaggagttggagaccagcctgaccaacatctactaaaaatactaaaattacgtctctactaaaaatacgaaaattagccaggcgtggtggcacatgcttgtaatcccagctacttgggaagctggggcagaagaatcacttgtacccaggaggcggaggatgcagtgagccaagattgctccattgcactccagcctggacaacaagagctaaactccgtctcaaaaaaaaaaaattgtgaatcctccacttacacatgacattgaaagccatagagctggatgagttttgtaactagttagttcatataagcttgggaaaaaaatgtggaaggatgcattgaaaaagactggagagggagccccaggtacacatcctagctgttagtcctttggaaggttacccagcctctcagtctgtctataaaatgagaataacacagctctccaaatggcacgacacccgctaccttttggcttggagacgctgccccgaaggcggaacctccaggacagctacgtagcgtcccgagcactcagactgaagccagggcagccatgttcattattggaaccgtgaggtgggtagggggggtggtgttgagacagctgtcattttcagttagggcaaaagccaacttccggtcaccatcttgagtgacgacagaggcggagctccaactgacatgttcattaagggcagggctccgagggcgccacctcgagagcgacggcgggctacccggggcgggctgaggcaggttgtagccccgccccgggccttgggctccacctctcggccccacttccgccgggcaagcgtttgtaggcggcgctgccgtaaatcaggcggtctgcttgccgcatcacgcaagatggcggccgcggcggtgaacggggcggcaggcttctcgagctccgggcccgcggcaacctcgggcgctgttctgcaggccgcgaccggcatgtacgagcaactcaagggcgagtggaaccgtaaaagccccaatcttagcaagtgcggggaagagctgggtcgactcaaggtaaagtcggcaggcccaggaaaccgagtgttgcgggcgtgggaggcgctacgaggtgtctggacccaaccaagtcccgggccgcggaagccacctcggtgccagcgagactgaggcgggctgggggatccgatggggtgaaagatttggaacagccaaagtgggggctcggagggcgtcaagaagcgagagagggacagggagcgttgatggtcacgcctgtaatcgcagcgctttgggaggccgaggcgggggagcgtcgcttgagcccaggagttcaagatcagcctgagcaacatagcgagactctgtctctacattttttttttaagtgagagatgactggaatggacccacgcgggggtggtgggggaatgattggaagacttatggcagaactgagtgaggggttagatttttggtgcgtggaggcttaactggtcggagtggcaggattgggattcgggcttttcctgatggtggattccaggcaagaccaagtgggaagtgaggactgcccggagtgataaaagaatgaggctgaaaaggtgggctgtgtagagggtgtgtggttaagaccaggctgggttaggatctgagagatctggggcttaggctcgcatctgttgggagagggggcagcctagttgtgaaggcaggactgaacctagaagaaatattcttacaagtagagaacaagaatacggggcccagagtgcttcagaccaaacatctgttgggagggagtgtaaatccagtggcttggaacaagctgctgagcctgctaaggaaagatgtatgggctgaactgtggggggagatttggacctccccctcccagatatagattttggggatagcccagctaccccttccccaatagattgtggggaagatgggccaagaatggaatgtactcctgtccccaccgccgcgtgattccactgggtcaggcactgagtgtccctccttgtttccccagtggggctattaataattgtaatgtgatgtaatcttaaatgggcatgtgttgcgtgctcaggccctgttctgagtgctttatgagaaagcattcctcatgagtctggatgatggttagctccattttccaagtgggaagaccagagcgtagagcaggtaagtcatctgtatttgaattcccttcttttctttcttccctccctcccctccccatcagctagttcttctggagctcaacttcttgccaaccacagggaccaagctgaccaaacagcagctaattctggcccgtgagtgtcactggggttggttgggggtgataatctgggggtcatggcaggaatggtagcactggtggttggggaagagacctcagtcacctcctgagagctcactctgtcacccacaggtgacatactggagatcggggcccaatggagcatcctacgcaaggacatcccctccttcgagcgctacatggcccagctcaaatgctactactttgattacaagtgagaatgggccctgcccccaactgggggggtggttgcatggaagctcctttatttctggagctctggctgcttgggtcctcttccttcatctgggaactcctcctggcttagttctctcctcagtggtgcagggtcagggcttggcttggaggtcctgagacttggcttgactagtcagtctccccctacccattcccacattgcaccccctctgcccagtggggctgccatcacctttcacgtgtcctggccccagccttgcccctctgactcaaacccctgtggcagccagtaggatcatgtgacactaaaatttgacactgtccataccccgctcagaacctgccgtggctcttcatggtcctcaggcacaagaccaagttctttcctgtggcttccaatgcagttccagctcacacccctctgcctgtgcctgctcatcccagccctttctctcactggactgtgagctttctaaaggcagagcttggaactgtctcagttactgctatgtccctagcactgcctaccacagggccaggcccagaacagggactcactggatatgtgttgaatataaaactgaatgatacctgcacagattaatgattgggaatttgacatcagacaaatctggctttgaaacatccagccgcttcctgattatgaggtcttgggcaaatgactttacctctctcagtttccctgttaaagtagggagtggtgattcttttatttatttatttttggagacagggtcttgctgtgttgcccaggctggagtgcagtggtgcagtcatggctcaccacagccttgacctcctgggctcaagcggtactcctaccttagcctctcaagtagctagggctacaggtgcacaccaccactcctggctcttttattttaattttttgtagagatgggggtctcgctttgttgcccaggctggtctcgaactcctggccacaagtgatcctcctgccttgggctcccagagtgttgggattacaggtgttgagtcattgcatctgactccaataactttttttttttttgagacggagtttcactcttgttgcccaggctggagtgcaatggtgcaatctcggctcaccacaacctctgcctcccgggttcaagctattctcctgcctcagtctcccaagtagctgggattacaggcatgcgccaccacgccctgctagagtccacccaggctagagtgcaacggctggatctcggtgcactgcaacctccgcctcccaggttcaagtgattctcctgcctcagcctccctcagcctcctgagtagctggtattacaggtgcccacgaccacgcccagctaatttttgtatttttagtagagatggggttttgccaggttggccaggctggtcttgaactcctgacctcaggtgatccacccgcctcggcctcccaaagtgcttggattataggcgtgagccaccgcgcccggccagtaactcttaatatagttatagctaacactttgtgtttatttgggccaggtattgttctaatcaccttacctgggttgaatcatttaattcacttaacccttgttcattcaacccatctctacgaaatggatactgtgaggccgggcatgatggcacatgcctgaaatcccagcactttgggaggctgagacaggaggatcacttgagcccaagatttccagacctgcctggccaacatggcgaaatcctgtctctacaaaaaatattgaaaaattagctgggcaggctgggcatggtggcttacacctgtaatcccagcactttgggaggccaaggtgggcggatcatgagcttaggaggttgagaccatcctggctaacacggtgaaaccctgtctctaaaagaaaaatacaaaaattagccaggtgtggtggtgggcgcctgtagtcccagctactcgggaggctgaggcaggagaatggcatgaaccgaggaggcagagcctgcagtgagccaagatcgggccactgcactccagcctgggcgacagagcaagactccgtctcaaaaaaaaaaaaaaaaaaattagctgggcatggtggtgtgcacttgtagtcccagctactttggagtctgaggtgggaggatggcttgagcgtgggaagttgaggctgcagtgagcctgggtgacagagcaagaccttgtctcggaattgaaaaaaaaaaaaagggctgggcgcagtggctcatacctgtaatccaagcactttgggaggccgaggtgggtggatcacgagatcaggagttcgagaccagcctggccagcatagtgaaaccccgtctctactaaaagtacaaaaaattagccgggcatggtggcatgtgcctgtagtcccagctacttgggaggctaaatcaggagaatcgcttgaacccggcaagcggaggttgcagtgagccaagaacgcaccattgcactccagcctgggcaacagagagagactccttctcaaaaaataaataaaaggatactatggtgatacccagtttacactttgggaaaccgaggttgtcatttcactgaagtgaggtcactcgctcttgtatgactcaatatgactcttgtaaatgacttattcatgcatctttgggacacagtttcctcatatgaaaacccaggacctgatacctcttcaggaagatgcatggggcgttgtgaggattcctggagcctggggtagagggctcgctaggcccttaaatcctccttaacctgcttccccatcccacgtccacagggagcagctccccgagtcagcctatatgcaccagctcttgggcctcaacctcctcttcctgctgtcccagaaccgggtggctgagttccacacggagttggagcggctgcctgccaaggacatacagaccaatgtctacatcaagcacccagtgtccctggagcaagtgagatggcaaggggcaggggaggacctggccaaagtgggtggtgcaggggtggtcttaggagggctttcctgaaggagtggccagggttcacccatctttccacccacggacccatcctcttgtttgtccaacaaatactgagtcccagctgtgtgcctggcactgtggtaggttgtcagactgtgcagtgagccaagcaggtgaaattcatgatcttgtggtgatgacactggggtgtggaagcagatagtaagcccgaagagtgagtggcctgcgcagtctgtcagatgctgagtgctgtggagaaaaagcaggaaggagggtggagaggcagggatgggtgatatttatctcggggagtcagaaggcctcacctaaaaggtgaaattggagaaagacttgaaaagggtgaggaactggcttatgcctgtaatctcagcactttgggaggctgaggcaggaggactgcttgagcccaggagttcaaggctgcagtgtgctatgatcacaccactgtattctagcctgggtgacagtgagattctgtctctatttagaaaataaatgaataaaaacatattttttaaagaaaagggtggccgtgcacagtggctcacgcctgtaatcccagcacattgggaggccgaggcgggtggatcacctgagttcaggagttcgaaaccagcctggccaacatggtgaaaccccgtctctataaaaatacaaaaactagccaggcggatggtgggtgcctgtaatcccagctactcgggaggctgaggcaggagaatcacttgaacccaggaggtggaggttgcagtgagccaagattgtgccattgcactccagcctgggcaacaggctcaaaaaagaaaagaaaagggtaagggactgaaccctgtggacagccgggcagaggaaccagccagtccaaatgtcctgaggcagtactgtgtctgctgtgttcgaaggacagccaagaagacagtgtttttggaacaaagtgagcagggccagggcaaagccttaggacctaaggttaggaagttgttcctggagctgacatcttatgggaggatttggtcagtggggagaggatgggagagagggcagttagggcgggcagcacagttcgggcaaaggtgtacagggatgagcctgtggtggagccagcgctgtctccctcctggaaaatagatggataattggacagtagatgagataatgagatgccagcccagagcaggcttggggggagggagggagggaggaagagggggtgagagagagagagagagagtgtgtgtgtgtgtgtgtgtgtgcgcataaaccagcaagggctttctggaagagggggtacccagggcaggggtgtggctgtgtggcaaagggattacaggggcactaggagtgtgatgaggcccacacaggtaggcccctttgcagcctcctcttcattctctcttcttcccccttcccggcttctgcagtacctgatggagggcagctacaacaaagtgttcctggccaagggtaacatccccgccgagagctacaccttcttcattgacatcctgctcgacactatcaggtgcgtagcggggccgggccctgtggagtttggaaagaacttgggcttgagtcggacagctccgagtctgaatctcattccagccattggttgtctgggtaggctaggtgtgtttcttatcctcctagcacctcagctctccttttcagtgaattgggcctggtcatgggattgtggataacggctctcatctcaccacccttggctgttgacatgtgtggccacgtgtgtcaaacctgagcatggaattggttcagcaggcagggattgtgcggcctgtcttagcccatcttccgtcctagatacccatccagtgagtcatgagacttcacctccggccaccaaaactgtggaaccctcagtttctccttctctagaatgggttgaccaaatcccagcagccccttgggttgccgtgtgcacaagtgacatcccacgggcagatggatgtgacatacaaatcccttgaggagtaaaagggtgtcgaagtggtggctgagctgatgcactcgggcagagcaccaaatcagaatgagtttccatgccttaggtgcaaaggcaagcccagaggcattcgagtgaggagtggtagccagtacccactacctaccgcatggcctaagcgatattggaggcactcctccccatcactggcttttccccagagcttaccccctccctcactacagtgacttcatgccttgctctatttctacttcggtgttgttcgtggtgcctcttgatgggtacaaggaaccccctcaggatctatgaagtggggtgcagcaccctggtgatgggtgttatgagaagagatgccctcatgtgagtcccaagctgggtttcagacctgaaatcctgtggctgggagtgggattcagagtgtgggcccaggagtcagagatttcagtggggatcacccgtggcccttgcttgctttgcgagtctggtcaagtttctccccttctgagccttgatgaataaaacagggcccttcacatattcctgccatcagtgctgaactccagggtcagagctgacacatgtcaggtctggggggacaggtcctgggaggttgttgatgctcagtaatgaggagcttctcatcttcccccagggatgagatcgctgggtgcatcgagaaggcctacgagaaaatccttttcactgaggccacccggatcctcttcttcaacacacccaaaaagatgacagactacgccaagaaggtggctggggtacagggcaaggggccgtgggaccaaggggtgaagtcactaacaacagtgtggggtggcttagagggacactggaacaagactgcccaggtttaagttcaactgtgtgactctaggcaagctgccaaagctctctgacatcagtttctctatccacagaatggggctagatacatgggatgagcttagtacctggcagcagctggaggtgggcgctgcacgcatgttggctgctgtctttatcaaaatttcttagaggtggcagctttttctgcaagactttgcttcatttggtctcaggcgtttgagcacgagcaacgcttggtgttgcaggaggagggctgggaccaggctatggaaggtgaaattgggctgggtgcagtggctcccgcgcaccaaggtggatcctcccacctaggctcactctgggaggctgaggtgggaggatcgcctgaggtcaggagttcgagaccagcctggtcaacatggtgaaacctcatctctactaaaaaatacaaaaaaaattagccggatgtggtggcgggtgcctgtaatctcagctactcgggaggctgaggcaggagaattgcttgaacccaggagggtggaggttgcagtgagccgagatcacgccattgcactccagcctgggtgacagagcgagactctgtctggggaaaaaaaaaaaaaaaagaagaaggtgaaattgaattttagtgatggtgacagctggtaactgatctgtcactcaggccaaacactatcctcagtgctttaaagatgttgattcaccaaatcctcacagttgacccagagaggtgtgtaattagggtcccagtctcaacacagagaaactgaggcacagagaggtgaagttacttgtcaagggtcgttgggcagagtacgattggtgagaaaagagagcataggacacgtgggcaagtgctggccccatagggtggggatggagcctttgtgatcactctactcgtctctaatccctcctttcctgcagcgagggtgggtcctgggccccaacaactactacagttttgccagccagcagcagaagccggaagacaccaccattccctccacagaactggccaaacaggtcatcgagtatgcccggcagctggagatgatcgtctgagccccccgggcactgggtggggcagggcacgagttatttaaaacagttacactgcagggtttcgcccaataaaggtggactgacattccctcttccaggcccttgtctccccagttgggacggcagagagacaagttcttatatctgaagaacttggaggttttggggcattcaggagttggagatagcctccaactgggtcagcctctgtctggtgggcattgctcagggtctcaaacatggacgcccactgtggggccccagcagcactgtggcctgcaggagggcatggccccaggtagggggactgttctagccagctgtggacacataggaatgctggaccagggtaccagattttttcaacaaagggggtgaagtgtcctactaaaaagaataaatgttggcagtgaattaaacaatttttcaaatgacatgtgaaatggaacccatctgtaggctgccagtttgggctctttgtggaacaaaaggtgtgggccctggtgtgggcttgtgggtcccaccctccctgagccagcatgtgattgaggacctccccgcacaccccccagcctaggtttcctgccttgaaattcttgggaaggtgttcaaggcgcagggtccaaatctggctgaatcccttgtgggatgtggaaatttcacaagtcttccagagttagttttcccaactgtgaaatgggaatgatcactcctttgcaaagtggtttgtgctgagcctgtgagcttggtaccaggttagctcagaattggggcttatggattaaggggaatcagatcccccccgccctggacccatcagtctgggtgctgggtgaatggaacctcagttactgctgctctggtccagcttcacgattgtttccaagatgtgctttaatggcgatcctgccctgctgcaccctacccactgccttggcgagtgattgacaggctgctggcatctggattggttattttattggcatggaggggaaggtggagggtgttgagccgactacactcagttggaatgggtggcctgcaagtcgtagtgctccagcttggccaccagagagccggacagcttgatggtggcaacccagggtggctcgcccaggtggttggtggatgtgctcagcctagtgggggagggtagagtcagcaaagcccagcaatgggaccaggcctctagcccttctagggcctccctgtccccatatgaatagggaagcttctgaaggctatattggaatatcccaaaggcagtttagggcagggctgtggccacttaataggaaagggagctgagggctggcgagtgtcccagctaagcttcaagaggtccagggcagtctcccagtggttcagcactcccaggagtcagtatcagaccccagtggccagatctggtgattcagtgtgggtagggggtggctggaggatgcattgtccccctggatgtgggactcaggaggagcctccccagcacaagggctgggacatcagtgccctctggcggctgaagccttgagtcccagagtcaggagaagtcctcagaggctagaggggtcaggagtccagggctgcccctgtgcccagtaaagttggaggcgtgcatctacccccatttagttccaggaagacagtcatcccctcacccccatccctgagtggcctcggacgtggtcctccttgataccctcagggacagggtcaaggcagtgtatagggtcaggccagctgggaccagcctccctctctaatggctccaagagaggtacaggagggccaagagtccacttagggattggatgccatagggctgggccagggtgtccccctttccccgtcaaaggtcagcatgggatcatgggtcctcttggtcctgaagggtgggagctcagctaggtttgagatgtggcagagatgaaggccacgggtcattctagggtcaggaagccaaagggctgagtaggactctatccagcagtctggggttcggcaccctcctgtcccttctcccctctcaccaggcagagacgttgcgtggcaggcggcgatggcgtggctggtggtggcagtaacacttgcagggacaggagttaagcacctggaagggcagccagtggcgcgcagcgcgggtgttagctgccccagtctgagaggccccgctgccaccaccccctccaccactgctgtcaggcacggtagctgtagctcgttcgcgaggaccatctccatgcaagccatccttacgggtcgcgccccgggctgcacgggaacccttgttcctgcgcgtgcgggtcttgatgggcgcagccgcgggtgcgggcgcggacacaggcggcgagggctcagccacggtgggagctggagccggggatggggccggggcctggtcggcggctaaggctgggggcagagcaggggctgcggtgggagccagggctgactccttgtggcccagacccggggtgagcgggggagccaccggcagcggcgttggctggagcgctggtggctgcagtgtgggcggcggtgtgggcggtggcagcggtggtaactcctgcaggcctggaggccccgggcgcatgggctcgccattggtgggtgctgggaagatgaacgtaggcggcgccagcagggcaggtgcgggcctccggggcccgggagctgagtgtatctgctctggtggtggcggaggggagccccaaggcccagagagtgcggccgcacgccgtcgcggcgccccgatgcctccgccagccccgttgaagcggaagtggcgttcagggccgtcgggagcgctaacccagtcgaatttgggcttcgagcctgggaaggtggtgtagggtggcggcggtagggcccgggcttgggacgcaggcgccgagggaggaccagagcacccttcgccgtctccatcacctccctcggcttcctgtgcccctcgagaaacctctcccaaggggcgagcggctccaggaggcaggggcccttgcttcaggacctcggcgtaagagatggcacctgaggcagcaaagaggccgccgcctccgccgccccccagcgaagctttggctgctaaggaactcgaggctgccggaggggccaaagagggcctcgacttgaaggtgattttacacagcaggctcagaccggactcggaatccgcaggctgggccatttcgccttcgcccgcatggggaggcgcccctccgcgagccctgccggccgtctggccctggttgcggggcccagcctggctttctgtcgggggtgaggcgggtgtggccagagcaggagtgattctgcggtccgccggctgccgttcagaaggtaatggtggtggcggcttccaagtctccaggggcggcggaaattgggatggggccctcgggacagtgtccttcacggatagttgccggggcggcggcggcggcttcagcgggcggaggctcggagggtcgccctggccgcgatggctcgcctccagcaggcggcggatccggggaactggagtgcccgcgggcttttgccatttagacgggccgggcagcagagtccccgcgggggccgggggtggtgcagagaccgcggccgcctcttcaggagggggcatcactggagagggccgttctaaggtgaggggcagggtcgagggtgaggcctggggctcccggggtaccatgagtcccgggggtgtggcgctgccagggaaccagacacccagcccacgagtcaggcgcatggcctgggaggtcatctcgggctccaccagggacgtccggcgggagtcgggggcgcggtccgagggctgcacttttcgggagcccccgcccgcggatggctccgactgcaagttccccatttctgacggagctcggagactagtcagaaaaatttactccagtcagcctgccagggccgtggggaccctacgaggctggctgtacttgatctaatgcgtccgcaccggccccgcccctgttctccaagatccgatcaggcccaagtccttaggtcgcactcctgttccccgaccttcgacactcacgccttcttgcccatgtccccaacacagctgctgttaagatacttcactaccagccccattatgtactaaggttccatgcctgtccccttggctggtcatgctgatccctcagtcctctcctctaactctccgactccccgcctctctctagagcacctgggtcccgccctcttcccaggcaggggcagatcctcaggcctcacccctaaacctcttcccgctccaggtctactagctggcatccacagtcaagctccacccctgtccccaagctccgccctggccccgcctccccccagaggaacccactcaccgagtcctccagccgagcagagttcagaccgcggcgccctgggcccggggcagggcagggaactgccgtagcagaaaataaccgaaaagaacgggggtgcgggtgaaggcaagtgggcgagacaactagggcggaccccgagatgtaggccccgcccccggagctcgaggccccgccctcctgcgagcccgcgggagcccggccccttacgaacctaggtctccccttgaaatactccgaggtcttgttcctcgcccccaggccttctggttctaagctccacccctttgggttgttctccttagcccctcccctttagaatgtcccgcccctctcattccctcccgaggccccgcccacgcgaacaccgatgcgtcgctcctcccctttggacctctcatctgccccgcccctaaggcaatttacctctaagctccgcctttttaagacccggcaacatcgcttctcaagaccctctccttccccccgggcgccgagaaggcccatccaccgtgggcccgccccttcgtgacgcacgcactagtcctcgcctgcagcatccaaacctccttatacccaggccctccaaccccacccacttgtgaaggctcccctctcgccccaccccttatcgaactctgccaggcacccaagccacagcgtagaccaccacctctttagaaccttgagaccagtccctgtccctgccccgtcccctcctcatagcattagagaccaatggcgcagatgggtggaaaagtgggggatcccctctggatcttaagaaaatgggggctggggggttgctctctggagctagtgccgggctctaggacccagcaggcaagtaagcccgcctcgctcttacccctcccccaagccgccccttccccccccacccgtcttccaggttccccctccctcccccctcgccccggctcccggtgcccgtctccagcgccgccggagccagccagggagccggaacgaaaaggaggaggaggaggccgcgtcgccgccgctcggagcccggccggagcctcgcaggcaggtgccgaggggggcgagggggcgggggctgacagactgcctgccccgatgagggggcggccgtgaccgcgctgcgccttctgcccacccaggcgcccccaaggccccggctaggaggactagagagtggggaccccccaaactgcgcggcagccattcagggtaccagtcttcatttgtggggtctggactttctccgaggatgccccattcacaaaattccgtcctggaccctcaccgttgaggaacgctgaggaccactccccccgggggacacaggatgtgtggggagcgtaggccaccctgaaatgccagtgccccattccagctaggccctggggggacccctgctctcattccctgcttcacctgttgtcgggggaggcgggcggacaaaggaagcagcgtcacgtgactgctcattcacaaaatcccatcccattgagaaaagggggctgggggcgctgcagccgccccttcccctcctgaagggcccgggaaacccagcagcctgcaggtgggggagggggctagagctcgtccgggtccctaaggttgggacgccagggtccctgtgctggatggcagtgaagggctggacactgatcccgattactgggcggagggctacgtcctctgagctggggggcggggtaaaatggttctgaaggatgctggggctggggggcgggaagggaagagggaggaaggatcaatctgcccccccatcccatctttcccccctggcttccctcggctggggcctgggggagcagccttgatttttgtgaatgaaatgctctctggatgtgtcttcggtcgcccgtttctgacttcctctgcctccgtctccctctgagcctctctttctggccatttctggttctctccctgttccctgcccatctcccgttgctgggtgactcagtgagctttgcatccggtctcattcataaatccgggaaggggtgggtgggggggaaagagcctgggtttctcacccagcctgtggcctggacgacagggtgcggaggcagggttgggagaacaggagctgagttgatgggcccagagaaaatatatatgcgcaggcacccagctgtgagggggagcactgggtggggctgtgggtatgtgctgagggaggagaagggggtgatagggataagcaggagggggagggaagggcaacaccagggctatgggggtggggacggagagatgggggaaaggtgggtacagagagaaagggcagacatggagaagaagatagaggtgagagagaagagatggcatgaggaagaaaggagctgtgtggaagacggtggccatggggttgaaggtgggtattgctagcttagggtgcagtggacctggacgtgagagatgaagttggaggggagatgagggttgagggaacattccatgggagagcagggtttgagctcatgactgtgttgtccctgtccttccccccacctcctgcaggtacatggtgcgggtccgagctgtggtgatggcccgagatgactccagtgggggctggctgcctgtggggggcgggggcctcagccaggtgagcgtgtgtcgggtccgaggggccaggcccgaggggggggcccgccaggggcactacgtcatccacggggaacgcctccgggaccagaaagtgagccaccctggggcatgcggggagggtagggacctggggagggaggggagaggggctggcatgtggagcagaggtcaggttgcctcccagcctaggaatcaagctggggtgtgaagtttgggagtgaatatctgtcctgtagataagagttgggaattgcaggatacatggggtgtttggagggtcctgtccactgccacttccagccagactatcctcgctgtctccctgtactgctcctcctccccgctccaaccccaggctgttccacagggggcactgcccccccccccccgccccgactcacaccatgtccctcctctgctcaaaaccctccatcttgctcagagatccttgccacgaggccctacaccacctggcccctgtctgccctaagtatagtgaagcatttgctggggtccatttgaaagtgtcagagatggttgacaattctatacatgggttcatcaggaataactgggctgtcgggcacaatgtggagggacagtgttgaatcagtttcagctagggatgtagtagaaagatatggattgtgtgaaaggcttgggggaaaggttttttttttggagcaggagtcagtggagggatttgaaatggagtgaaggaatatggtgatactaggcaaggatttgagggaacatcaatagggtgttggctagcatctgaaggggaatctgtggaagtctgataagactgttttggagtaagtgctggctgggtacagtgcctataatcccagccactcatgagtctgaggccggaggaatgcttgagtccagagtttgagaccagcctgagcaacacagagagagctcatctggaaaaaaaaaaaaaaaaagagagagagaatattttttgggtaaagtttccagagattattatcagaagaggattcacaataatattgtgagatgttcagtaaagtctgggaagtattgttgagccagaggggggatgttgggttatcagaaaggggttaacaatgttttgggccattcagcaagattcggggtttctacaggggcatcagagggaggtattaggaaaatgtagggatcaaggggttgggaaaatatttgagcatcagaggtgtgttcagtaaaattgggcgtagctgggtgtgggggttcatgcctgtaatcccagcactttgggaggctgaggcaggaggatcacttgagactgggaggttgattccgtagtgagccctgatcacaccactgcactccagcctgggtgacagagtaagactgtttcaaaaaacaaaacaagtaaaactggggagtcgtatcagtgttgatcagagttcagggttacacttagggttgggaaatgaggtttgtgagaagacactagggtatgcatgggggctggtgatggacgagacgtcacaggcatgtctgggttggggtatctgaccctgctttccttctgcccctcagacaaccttggagtgtacactgaagccaggcttggtttacaacaaggtgaatcccatctttcaccactggagcctgggtgactgcaagtttggactgacgtttcagagccctgcagaggctgatgagttccagaagagcctgctggctgcgctggccgcactgggtcgaggtgagcagcccaggtgatgtgcactgtgggctggcctgggagcgggaggagaagctgggctcaaggaactcactctctgcctctctccctgccccaggctcactcaccccctcctcctcctcctcctcctcctctccttcccaggatactgcagagaccccctgccctctgacggtgagtgtccaggatgcctctctgctgggggagggtaggggttttgtttttattctatgaacattcttgagcacctactgtgtagcaggcaccatgccacacaccgggtacacaaaattgggccggaactatgagtgtcaattcaatcccagttattctagtctttctgccctgtcatgattcacacgttcattcaagggtccttattgtgtaccttctgtataccaggcagtgctttaggcactgggttacatcagtgaacaaaaagttcctttcctcctggagcttctattctagtgtggaaaggcagaaaattaaaaaaaatatatatataaacaataaaaatgaataaatattgaaagtaaatggatgaacaaattattgacaaccccatgcttccagttactcaggctctaaatcttggagtcatccctgactccttatcttttatgcgtctcatctcatctgtcagcaaatattggttctactttccaaatcatcacaatctgcctccaacctggtaccatccaaactcatctcccaactggaccatctcaatagcttctcactgtcaactccttccctcctgcccccacacatagccagaggatccctatcaacggctgagtcagatcatgcccctcccacactcagaagcctcccagggctccaactcactcaagtaaaggacaaagtccttacagtggcatatgagatcccatgccatgtggccctgtgtgtctggccccctcacttactcggcttcggccacatggcctcttcactcttattctaacgtggcaggcacagccctgccccagcgcctttgcactggctgttgcctggaacactctttcccagatttccttgtggctcattcccttgtttctttcaaggctttatacaaatatcatcttctcagggagggcctccctgagtatttaaacttaagtattccatttaaaattgcaatctgccaatgccccttgtctagtgctaaatttttcccatgttctaaggcattttccttatttcctttctgaaaatactattatctttttttttttttttttttttgagacggaatcttgcactgttgcccaggctggagtgcaggggcacgatcttggctcactgcaacctccacctcccaggttcaagggattcttctgcctcagtctcccaaacagctgggattacaggcacccagctattttttttgtatttttagtagagacgggatttcactatgttggtcaggctgatctcaaactcctgaccttgtgatctgcccgctttggcctcccaaattgctgggattacaggtgtatttcccggcctattttcttatctattagtttacggtctatctcccatgctagaatgtcagctccaggccggcaaggatcttttgttcgtttcttgctgtgtctccaatgcctgaaacagtgcctggcacacagtaagtgtttagtaaatatgtgttgaataaacggaatgaatgaatgcacataatatcgggtgcaatttggcacttgctggaaaccttgggagttgcctaaaacacctggaggaacaaaactgattccctgggcagaaaaggggagggttccagggtcatgggagatgaagtggggccacaacagttgcagacagttcccatccatggagcacttacccgggaaagatgctctgctgtccaggccccctctggaatctgcacagtggtcttcgtgagtctggcacgtcgtgggtgctcaatgaatgtctattgaaggcagtgtgcagataaggtaggagttatgtccaagtggcagaaaggaagctaagggtctgagaagtcgtttcagctagtttcagaacagaggctggtttgcatgggaaggggagcactcggagtgggcgggactgccccaataacagtgtggggctgggagtgagagaggaaggcagctggctgcccaggggagagggattctgagaagcgggaagacgattagatgttcctcaggtttggcgagctgattagatcaggagaagagtcccacaaaaataacaataaccatttccagctctcccagtacttcaggcatatgctgtgcccttgacagtggccctaaccgcatccttatgaataggtactcttaggatccccgttttacagaggaggaaactgaggctcaaagaggtgagctcacttgccggaggtcacacaaccagtcagtgacagagccggggtttgaacccaggccttcctggccgcagagccctcgctctcaatgggagggggtctatgtgagggcatcggctgtgcgggggcgtgtccccgcgctgaggccgccaatctcctccagtcccacgtggacagcgactcctcctccagtcacagccgccaggagactcctcccagcgccgctgcggcccccatcatcacgatggagtcagcttcaggcttcgggccgaccacgcccccccagcgccgccgctcctccgctcaggtgcgacctgggagcctggggctcctgggggaatggggcggtgcactcggggcccgaagggagcgggagccatggcccggggaggtggggaacacagattccaggggatggctgacctgataactgggccggactgggagaaagcggcggggaaatagggagaggcttggaggcctgggtttctaggaggcttgggtgcgggcctcccgagtctccttgcgctcttggagattttgaggggtttcgaagtccagagaggtttaggaccattttcagagtgtatatttggggaactcctggaagaggactgttaaattcacggggagggtgggagagtcggtacccagaagggtaaaagaggcccaggaaccaaactcctgcgcctttaaggaggaggtggctgggtccagaacccctggatctcaaggtagagggggctgggagctggggctcttggatcttaagagaggacaggactaggaaccttcggcctctgggtccttaaaggtgtggggttggtgcgtggattcctctgtctgtccctggagaaaagtggggattgagggaccttgggagagaagcaagctggggtcttgaaaatctgaatcccagacccaagagtgcgctagggaactggatccttgaggctaagactgggatggattctgatctgtttgtcccttcgttccgcagagctaccctccgcttctaccgttcacggggattccggaaccctcagagcccctggcaggggcagggggcctggggtggggcggccgcggctacgaggattaccggcgctccgggccacccgcgcccctcgccctgtccacctgcgtcgtgcgcttcgccaagaccggcgcgttgaggggcgctgccctgggtcccccagcggcactacctgcccctttgaccgaggctgcgcccccagcgccccccgctcgcccaccccccggcccgggcccatcctctgcgcctgccaaggcctccccggaagcggaggaggcagcgcgctgcgtgcattgccgcgcgctcttccgtcgcagagcagacgggcgtggcggccgctgcgcagaggccccggacccgggtcgcctcctggtgcgccgtctaagctgcctgtggtgcgccgagagcttgctctaccactgcctgtcggacgccgagggcgacttctcggacccgtgcgcctgcgagccgggccacccgcgccccgccgcgcgctgggccgcgctggccgcgctctccctggcagtgccctgcctctgctgctacgcgcccctgcgcgcgtgccactgggtcgcagcgcgatgcggctgcgccggctgcgggggtcgccacgaggaggctgcgcggtgaggacggcctggtgggtcccctagccggcccgaggacccaaaattgagggtccaggaccccggactccgttcggacctaaaacccaaacctaggcacatccggaacttggagcttgagtttggattgagagatctcagacctggaacctggaacccaaacctaggactgagagaccccagccccagcttcattggggtgtctgtctaagaagtcccaggcgtcctgagttctggcgttcccccacccccacaccccacgaggaggctccaggcgtccccatactttgcatctcagaaaggccagggagcacatagatcccgaaaagggcaggtccctgttgaaatgaacaacctagaacccggtcacgcctggcaccatgtccctcagattacagccccacaattagtcaggacttgcccataactggctctgcctttattcaactcccagatcagatcttgagaccataggacctggagtcacccacaaacagttcctgaatattcacctaagacctggtgcccccacatctgagacattctcatagtcccaggacccctgagacagcaggacccctgagaaagtttcaaacagagtttgaaactctgttatgctctggaatctccagatgctgcccctcaaatctacccacgacttagtgcccacagacctggcctccagtccgggaacactgaagtctaagatgtccagggaactcccagacaccctgggaccccagactcttaagatgcactgagtgctcggatatactgaaacacgagctgttctcttaccaaaatgacttgggagacccatcccagagcccccaagatccagatatcagacaccaagatgctctggaagccagggatcaaagacctccataggtccacccacccccaagccagggttctcaggagctttggatatcatttataggactcagaggtgcctggggtcctcagatgtgcgactgaaggccaccaacacctcaggacccgagatactggtctcgagttctcaaatagccctctcttgcagtccctcctggacctggattttgagaccccaaatgtcctggaatcttcagcttctttctacccacagattcccaaccccttaagggctgggagtccagctcccagaagaggggatgctcatggtgacccagacctctgatgcccttggccctcagcccttgagtgaccctaaggtactttaggagcactggatccaataccccaaaggtgccactgacccccaaatgcaaggctcaagaccctacaacattgggattgttcctgatccaagaccttcatccctccataccagaggcgttcagattcgaggtgccccaagaccccagcaccctcagaccccagatttctttggattcaaacctctctagtctgatgaaccccaagttgcctctacacctgattcccccatccccacttgtcggacctcagagacctgctgccccttgaatcctgtcatccataggcccctaaaaccccaaggttccagcctctggaattctggtcccaaggatcccagcccaagcccccagcaatcctcagaattacccctttatcttagggtgggatccctaccatttggaactcattgtaggaccacccagggtggggcacagtggctcatgccttgtaatcccagcactttgggaggccaagggaggaggatcgcttaaggccaggagtttgagaccagcctgggcaatgtagtgagaccgtctctaaaaaaaaaaaaaaaggaccaagtaggagctccctcactgtcacgtctaggacccagcattgtcacagatgattatgcagggtcttcattaagtgaaggcacacagcccagggtttcgaggagctggaagtcacaccagtctgctggccacactgtgccctcagaagaagtgtgtgcaatggaaactttcaggctagttatggctctgctgtcccacagcccccagtcttgcagaccttccttcaagcacaaccttaattcctagtccaggttcaagtcccaccttttatgttctccccctccattaaccccttctcttcctatttatttatttatttatttatttattttgagacagagtctcgctgtatcacccaggctggagtgcagtggcacaatctcggctcaccacaacctccccctcccgggttcaagccattcgtctgcctcagcctcccgagtagctgggataacaggcatgtgccaccacacccagctaattttttgtattttgagtagagacagggtttcaccatgttggccaggatggtctcaaactcctgacctcatgatccacctgcctcagcctcccaaagtgctgggattacaggcatgagccactgcacctggctctcttccactttagagtgagaagttgcttcaggaagtttgaaagcctgtttcatggcccactgagtctcttctgtgcaaaggggggtgccacaggcttttttcccccaagtgaaatggggcttccagtggatcgaagatctggtgtcctgtatgggggcctcaaggtcttggagcaagacagtctcaatgttgtatgggcttgggacctgcatctggccccaagcatctggaactgtgcacttaacctttcttcattacccagacttggatggccttgttggggttcaagggataggtcctctgtctcttcctttaaattattaactatttattacatccggaacctgtgagattcagcactcccaaccagaccctgggatgggtgagagaaaagcgggggtgtctctcccctccccactctgcccagctctcatcactgtcagacccaccagagctgagggcggagggattgggggctggggcagcctgggtccccatgcccctctctgtgcctcggtctccccccttccatggtgggcgggggggaagctccattcttaacctacctcgttttggggaggggtgggacgggggaccagagtgctgtacggtgctgtgggatctgcagatgaagcggtgggggctaaggaaaggtcccctggccgccacttcccagcagcgcctctcccaggtcccccagtcctgctccctgctgagacccacctctgatccatgattccccttcattgcccccaaatcaggggtacatggagggccgccctgggagccaggcagacctcagaccctggagcccccaggcccaatttcccagccgcttgcccctcagatcggatgcttggcccccagatttgggggaggcaccccaacatatatcttcctgatcttgtttctaagccagtctgtgacctcaatattgttagtgtcagtgcaggctgaagtggtgggggaggatgggggccaaagacccagccttgtcatcgggggagggggcacgagatctgctccaagaaatgtctgtgacaaagtctcagcctgtgttatttatttgcctctgtgcaccccacccactcaccttcctgaactgctaaaccagtctcctacttaaattctcccttctcccatcagaccctcaagctgagttttataagacactcaacaaatgcatttattgagcacctaattatgtgccaagccctgttgaaagcactggagataaagcagtgggcagaacagacaaaagtccctcctgcaaagagcttatgagctttatagtaggggagacaataagtaaatgacttaatatgttagaaatgatagaaagcagaaagaaaaaaaaaagtgggaatgggggatacatgccattttagctagagtggccaggttagaccctcctcaggagttggcatttgttgttttgagacagagtctgactcggtcacccaagctggagtgcagtggcatgatctctgctcactgcagcctctgcctcctgggttcaagtgattctcctgcctcaggctcctgagtagctgggactgcaggtgggtgccacaacgcccggctaatttttgtatttttagtggagtcagggtttcaccattttggccaggctggtctcgaattcctgacctcaagtgatccacctgccttggtctcccaagtgattccaggtggaaatctcccaagtgattacaggtgtgagccactgtgcctagccaggagctggcatttgaacaaagccctgacggaggtgagggagttctggggatgtctgcagggaagggtattttaagtaaagggaacagccagtgcaaggccctgagacaggagtgtgtccggtaagtctgaggagcttcagggagctagagtgttgagaggggaggaagcagagaagagagcgctaggagatgagggcagagaggcgatggggcagatctgtcaggccttgaagggcattgaatggacttaggtttttaccctgagtgagacggagccacaggaaatttcaaacatgggaggcatgtgacctgactcagttcacaggctccttctgctgcatgtggtcagcagagtaggagtggggtgggggacagcttcacagagaggaggctgctgtgatggttcaggacaagacagcagcggacaggcccagggtgagggccctgaagggtggagaagtgggcaggtgttgggcctactttgtaaatagaacccacagatttatgtatgggatttgagatagaggagtcaagatagtaagtccaggtttttggctggagcaatttttttttttgttttaaattgagttcatcacccaggctggagtgcagtggcatgatcactgctcattgcagcctcaaactcatgagcccaagtgatccccccacctcagcatcccgagtagctgggattacaggtgcacaccaccaagcctggctaattttaaaaatgtttttgtagagacatgttctcactatggtgcctggtctggtcttaaactcctgggctcaagcgatcctcccacctcagcctcctgaaaggcggggattacaggtgtgagccactgtggcccacctctgggcaatttttaacatttgatttatgtcaaaaaatagccccccaagtgtcctgccttggggtaaacagggttatggggttactcgtatctgcccttaaggaacaagttctacccctgttcttccctccaggctcctggtccacccccaacttccagcagaattgtctaggaactactggataccaggatacagtaaggaagagattagatctgacacaatgtttacttagcaacagcaacaaaacaacagcagtagtaacagtggaaataggttccgtggtttaagagtatagagtctggaatttcatcttcaagccttggcatcaccatgaattcactctgtgacttatcttctctcaaccttagttttctcttctgtaaaagagataagatacttcgcccaatagtacacattaaatgctgtatatatattagttattccttattaagtactccctatatatctgctaagcactttttacatatgaaactctaattaatcctcagcaacaactctaagaggtaggtactattatccccattatacagatgggaagcaatttggcaggaacatggagctggcgagtaacagaatcaagccctaaccctttgcctgattcctagggtgtaatctcttaaccactatggtgcattgcacctgctcactccaaggcctaagagggagaggagtgaaggcctaacaggcacatcgtgatcgatgaggagggcctggtgtgtgaggggtgtgctgggattcctgggtcccttatgtaattcaaaccctgaggtggaaaggagggaggaagttttggattttaggcagagttgggtgaacaccactccgtctgggctgctttaagagcagaggacagggccaggaacactggctcaagcctgtaatcccaagctttggaaggctgagagggaaggattgcttgaacactggagttagaggcaaacctgggcgacatagctagacccctctctacaaaactttatttcttttttgacacggagtcttgctctgtccccaggctggagtgcagtggcgcgatcttggctcactgcagtctgtgtctcccgggctcaagcaattctcctgcctcagcctcccaaatagtggtgactacaggcgtgtgccaccacgcccggctaatttttgtatttttattagagatgaggtttcaccatgtgcccaggctggtctcgaactcctgacctcaagtgatccacccacctcagcctcccaaagtgctgggattacatgcgtgagccaccgtgcccggcctctacaaaactttaaaaaaaaaaaaaaattggccggttgcagtggctcacgcctgtaattccagcactttgggaggccgaggcaggcggatcgcttgaacccagcagttggaaaccaggctgggcaacatgaggaaaccttgtctctacaaaaaaattaaaaacaaatcagccaggcgcggtggtctgcgcctgtggtcccagctactaggtgtaagccaccaaggctgactgatttttaaaaatttagctgggaggctgaggcgggaggatctcttgagcccagaaggtcgagactgcagtgagccgcgatggcgccactgcagtccagcctgaacgatagagcgaaatctgcctcaaaaacaaaccaacaaaacaccagcagaagacaactgagggaggaaaaggaaaatggcaccgaagttgtttttatgtcgccgcaacagtgacacccgccgccagcttgtcttgacagcggagatcccgaacgcactgcaatttacagctccagggggcgttcctacaaccccgacaggttagccgaggggcggggcgggcgggccccggggcgggttcggcgtcctcctgcgccaatgggagcacccaagcccctgcgcgggaagatgccgattggtcagtgccgccggacgctgcggggagctcgtgcgcgcggcgcttttggggcggagcctgccaccggccgccagggggcgcgccgagaccacactttcatggaggcggtgaaggcggaagcgtgggagggggccgcggtggcccaggacctgctggctctggggtaaaagggtgtgcggtgaggctggtgggtgcaggaaggccaggtctgccccctggacgcggacgaaaagggattcccagtgacatccccgccccctcccgctgcctcggtccccacaggtatggaggtgtcccgggggcggcgtcgcggggcgcctcatgcccagacttcagggggctgtgcgtgcggctggcggcggagctggcgacgctgggcgccctcgagcagcagcgagaggcgggcgcggaggtgctgagcgccggcgacggtaaacacggagcgggagggtggcaggggggccgccacggggccaccgagccctgacacccctgtcctcgcaggccctggcgcggaggaggactttctgcggcagctcggcagcctgctgcgggagctgcactgcccggatcgcgcgctctgcggcggggatggcgcggctgcgcttcgggaacccggtgccggactgcgcctgctgcgtgagtcccgggatgcagaagtggcaaggccatggcctccggagcggcgggctctgactttttaggggaaatcgaggttcccaaggggtgtggtcagaactttggggcggcccagagggtacgaggtgggtggggtgagcatgttggggcaagcagagcgctctaaaatgggcgggggtagaatttcgttttattttttatttattttattattattatttttgagatggagtttcactcttgttacccaagctggagtgcagtggcgtgatctcggctcactgcaacctccacctcccaggttcaagtgattctcttgcctcagcctcccgagtagctgggattacaggcgcgcgacaccacactcggctatttttagtagaaacggggtttcaccatgttagccaggcaggtctcgaactcctgaccccaggtgatctgtccacctcggcctcccaaagtgttgggattacaggcgtgagcccaccacgcccggcccggggttagaattttaattggagggcctaggagctcaagtgggttggattaggaggaaggcttgaggtttcaaagtgggcaggagtggaattcgtaggaggggacagggtctcaaggtggggcttactctggaaggctttaggtgggggggactagaaggtggaggattttgttttgttttgtttttaagtggaggtggggtctccctatgttgccctgtctggtcttcaactcctggcttcaagcgatcctcccacctcagcctcccaaggtgttgggattacaggctacaggcatgagccactgtgcctgggcaaaggtggaggttttaaagccggtggagcctcttttttttttgaaatggagtctcgccctgttgccaggctggagtacagtgacatgatctcagctcactgcaacctccaacttcctggttcaagcgattttcctgcttcagcctcccgagtagctgggattacaagcactcaccactatgtcctgctaatttttgtatttttagtagagacacagtttcaccatgttggccaggctggtctccatctcctgacctcgtgatccgcccgcctctgcctcccaaagtgctgggattacaggtgtgagccaccgcacccggccatcagtggagctttttgaccaagatggatgagtgggtagcagcctccctgagtgcacagcacccatttattactttcaggctttctctgctcagagctccaagccacccgcctcctgtgcctccgctctctgctggatccgagtcctaggccaccccttggtgaaggggtagtggagggagccggcatggtccaagaactggaccttaccctccaagccctggggctgcccagacctgcaccagggacccccgccagccagctgctgcaggagttgcatgctaaggtagagagtcagagtcccctcccgacctgggctaccccactttccttgtgggggtgggggtcctctctccacttctggaaggagtattccaaccactggcctgttttttctggagctgtgactggcattctcacatctgtggcctaggtcctcaggggtgtggggagctgagtttacagaggggcccatcctctctgccccagttggcctctgacttcttctcccatcagatctcagagctgcagccttctctgcccccagggtccctgcagcccctcctcagctgctcgctagatgcacccagatgggtaagactgtgtgcgactgactgaatgtgaactgtgtcctcatcagaggtggcagtgagagggacccctagcctgaccttgagaccttttctcccaggaagcgttggagtctctgtcccaaagcctcagagatcagtaccgctgccgccgctgcctcctcctcaagcgccttgacctcactacatctgctttccactggagtgaccgggcagaggtgtggtgggcaggggaccatgcagaattggagaggcccagttgtgggggctgcagttgcagggaggaggaatgagggccaggagtatcaccctcttgcaggttctcaggccatggacattttataattttttgaggtttggggctcctagaatctcagggtcccagggtattgttgaattcccagctctgagctggcagtatattcagaggcataccccatcattttttttttttttttgagacggggtctcactctgttgccaggctggagtgtggtggtgcgatctcagctcactgcaacctccgactcccgggttcaagtgattctcctgcctcagcctcctgagtagctgggattacgggcacatgccaccatgcccagctaatttttgtatttttagtagagacagggtttcaccatgttggctaggatggtctcgatctcctgaccttgtgatctgcctgtcttggcctcccaaagtgctaggattacaggcatgagccactgcacccagccttttttttttattttttattttttgagacggagttttgcttttgttggccacgctggagtgcaatggtgcgatcttggctcaccgcaacctccgcctcctgggttcaagtgattttcttgcctcagcctcccgagtagctgggatttcaggcatgcaccaccacgccgggctaattttgtattttttagtacagacagggtttctccatgttggttaggctggtctcaaactcccaacctcaggtgatctgcctgccttggccttccaaggttctgggattgcaggcatgagccaccacgcctggccaagtgtaccccatctttaagagatacgagcagagtcaggcacagtggctcatgcctgttatcccagcactttgggaggccaaggcaagaggatcacttgagctcagaagtttgagaccaccttgggcaacatagcaagacccccgtctctactaaaaattaaaaaaaaaaaaattagctgggcatggtggcgcatgcttgtccatctcagttactcaggaggctaaggtaggaggatcacttgagcccaggagattgaggctgcagtgagccaccatcacgccaccacactccaggctgggtgacagcgagaccctgtctcaaaaaataaatatttatttgagctgtgggcagtgaggtcttgaatggtaaagtaatgcttccaagatgacaggtcccacgtggggaagggctccagggtaccttctcttacctcctccccactccaggcccaaggagaggccatgagggcagtgctgatcccaattcgagaggttctgaccccagaatcggacatctccattgcacacgttctggctgcccgagccgacctgtcttgtctcgtcccagccaccagcgtggctgtccgcagagggacctgctgtgccatcaacaaggtgggcatctggggtagggaagggccctggcatccttggccttcagattggcctttcagcctctgctccagtccaagtttcagacttaccacctctaatccacccactagacatggcagctagaaggacctcgctcacacaaaaactgactgtggactccccagctcagaatgcttccgtggctccctaatgatctgaaaacaaagtctagctatttactgagtccctggctacttctccagcttgggcttaaaatccttccctatcaccaaacactacctatttgttgttttttaacctttttttttttcaagacagagtcttgctctgtcacccaggctgcaatgcagtggcttgatcttggctcactgcaacctccacctcccgggttcaagcgattctcctgcctcagcctaccgagtagctaggattacaggcacccaccaccatgtccggctaatttttgtatctttagtagtgacggggtttcaccatattggtcaggctggtcttgaactcctgaccttgtgatctacccgccgtggcctcctaaagtgctgggattacaggtgtgagaaaccgcacccttttaaccatttaaaaaaaaaaaacaaagacagaaataggccaggcacagtggctcacgcctgtaatcccagcactttgggaggccgaggcaggcggatcacgaggttaggagatcgagaccatcctggctaacacggtgaaaccccatctctactaaaaatacaaaaaaaaaattagccgggcgtggtggcagacacctgtagtcccagctactcaggaggctgaggcaggagaatggcgtgaacccaggaggcggagcttgcagtgagccaagatggcaccactgcactccagcctgggcgacagagcaagactctgtctcaaacaaacaaacaaacaaaaaacagaaataccctctgttttagtgattaggtatctagccgcatgcctctgtaagtagtcttatgtaaaatgagtattagggaataaagtctaacacagcaactattgaggcaaaatttaagttaagaaaaaaactgagcccgaggtgggtggatcacttgagcccaggagcagaggttgcagtgagccgggttctcgccactgagctccagcctgggcgacagagcctaggcgactctgtctcaaaaaaaaaaaaagaaaagaaaagtaggctgggtgcagtggctcacgcttgtaatcccagcactttgggaggccaaggtgggcggatcacaaggtcaagagatcgagaccatcctggctaacacggtgaaaccctgtctctactaaaaatataaaaaattagccaggcgtggtggcacgcacctgtagtcccagctacttgggaggctgaggcaggagaatctcttgaacccggtaggtggaggttgcagtgagctgagatcacaccactgcactccagcctgggcaacagagtgagactccgtctcaaaaaaaagaaaagaaaaaagaaagctcatgctagtatcttccaccagttcagtcccccctcccccagccactgtactcaaatagtcaacatctgctgtttcttcttcagcctcatgctgttcccttcgctctctggcccccttgtccaagatactttttttctctgcaactcaaatctcataaactctcaggtgcttatgggcaacgttccagaccgggggggccgcccaaatgagctggagcctcccatgcccacctggaggagccgaagagaggatggaggcccccagtgttggggtcgcaagaagaagaagaagaagtaaagggggactggtggtcgggggcggggggtcctccatgagatgctaatgctatcggtaatctctggggagtccgtttaaggctttccttggtatttggcacccaagccccccatctcctattcctgagtccccaaatgccctgctcccattcacgtcaataccaagaaccatgttctccagagaataaatttaatttatgacagctgtaggacctctctctgtgggggccaagtcaggggtgttggggtttgtgaaggggttgggggggtctctgctccctgggactgaatgggcccctgctgctcgaccctcaaagttctttgccctatagcacatctatcctgtgccgtgggcatgggtaaggagacattcaggcatcagacaagcatctgtcaggcgcctaccacctgccagccctgttctaggcactggggatgcagcagtgaatgacattgatagaaatccctgttctcctggagttgatgctcctgttgaggaaagacagacgttcaacgagataaagagggaaaaagtataggctgtcagagggagcacattctatgcagaaaaacaggagctgggcgtggtggctcacgcctgtattcccagcactttgggaggctgaggctggtggatcatgaggtcaggagtttgagaccatcttggccaacatggggaaaccccgtctctactaaaaatacaaaaattagccgggcatggtggcgcgtgcctgtaatcccagctacttgggaggctgaggcagaagaatcacttgaacccaggaggcggaagttgcagtgagctgagattgcatcattgcactccagcctgggtgacagagcaagactctgtctcaaaaaaaaaaagaaatggagatgtagggagttggtagaatgaggcctgagtctaaatgtatccaacacacagccgcacagatactaagtgcagggaaagggagcaggattagcatccaccaggatgcaaaagaggaaagtcacttccagggaaaaagatgacggacgtaccactaaaggcagtgtggatgggaaggcggatgcctctggaggcctacctctgggagccctgccagagtctgacggcaggactcaggactgactgggggaagggagtgaggaagagaggagaccaagagatgtctaggaatccagcttggaggatgcagttgatggtgggtccatcaccgggcaggggacctggaaggaggaagggaggaagaaagatgacagatgatgtggggagcatatgatgtctaggagacgcttcactgccaggaacacttccctgcccagactggtaagtggatgaatgaacgtcccctgtggaatcctttttgtaacccaatctgagagtctctgccctcaaatagtggcgtttactccattaacccgtacagtagctcctgatatatttggccttattcttgctatcttattggctagaatccttttttctgttctcctagtggttattgtccccaccctacccccaacatgttgaaacttctatttttcttttttttttttttttgagacagggtcttgctctgtcacctaggctggtgtgcagtggcacaatctcagctcactacagcctctgcctcccgggctcaagtgattctcctgcctcagcctcccgtgtagctgggactacaggcacccgccatcacacttggctaatttttgtatttttagtagagatagggttttatcacgttggccaggctgatctcgaacttctgacctcaagtgatcctcccacctcagcctccccgaagtcctgggattacaagcatgagccaccacacccagcctatttttctatcaatattaaaaagtaaccagtatccataccctcctaccccagcagtcaaggacttctgcatatttgtactttctatgggtctccaaatctgtccagtcttccccacgccaatggcctgtgtcccctgtatccacttgggggtaggggcggtttctcctcaccgtatctgtttcccaggaagggtgtggggattcagtctgggtccaggcatggcgaagctggcacccagtctcaggctccagggatagcgtgtaggagtgattttcctcggagcctgtttgtgggtggatggaagggatgtgggtctgatgggaaggacctcttcttgaccttggactcaacccctttcccccaggccccttcccagcaccggtgtgctctaggtcttaccacagctggcatggggagctggtgtggatgggacaggagctccggggggtcctgcatcgcccttggcccctggcctcttcttacattctaccttcacctggtctctgcagtgtttgtggcaacacagcccgcactctgggggaaggcagcggcaggggtccgatctgtgtcatccattcttccagcctgcgggccaaggcttccctcccactcactgacaccccactcaccccgacagcggtagccttgcttggtgacaccccagagctgggaagagaaaggagaaaaggttacccatcctaggagagggagggctgtggattggcagggcagctggggagtggaagtgtggaagctacccaggttttgaaattctcaaggctagagatttaactggaattaaaggaatgtgggtggggtacagtggctcatgccagtaatcccagcactttgagacgccaaggtgggaggttgggaggccaaggtgggaggatcgcttgagctcaggattggaggctgcaatgaaccatgatcgtaccacggcactccagcctgggtaatagagcaagacccatctcttaacaaaataaataaaggaaacttggagattatctcaagtttagataatcacctcagatattagatttaggtaaaatttagagttactaaaatgcaaattctatgggcaagagttgtctgctgtattcctgctgtaaccccagggcctaggattacctggcacacaggaggtgctcagtaaatatttcatgaatgaataaatgaatgtgggaagtaatccaaggtttgtgaattagtctcgggttataggttgagagattgatccactagccagagtttgaggatctcttgaatttggaagttattcagagtttgaatgatctggagtctagagatttggaggatgattctgtttgaacataatctacccggtttggagattatccaggtttgttgttgttgttgttgttgttgttgttgttgttgttgttgttgttgtttttgagacagaatctcgctctgtcacccaagctggagtgcagtgctgcgatcttggctcatgcaacctccacctcctgggttcaagcaattctcgtgcctcagcctcctgagtagctgggatcacaggtatgcaccaccacatgcagctaatttttgtatttttagtagagacggggtctctcttgctatgttccctaggctggtcttgaactcttgagctcaagcaatccgcccacctcagcctccccaagtgctgggattacaggcgtgagccaccactcctggcctcctatctagagttttaggtattatccatggttcagcaattgtctggggtggacattatctgggattttgggattatctggcatttggagattatccaggatatagggaatgtctggtgtttagggtttatatgaaacaggatgatttgaagctggaggatttctggaatttgggggttatctggggtttgcggactgccggcttcaggacagatggaacctaagggtggtgatggggtggggtgctcacgaagccactgcagctgtcgcagaaggtaggctttcggaaggtgacctcatggaaggtgtgcaggaaggccaggcccaacttggagcagatggcgctggcccggagcaggtaccctgtcagctcctctctgctgaaggatcctctcctgggggcagaaactgagcctcagcatgacctgccccaacgtcctccagacccaggagtccaggcaaccccagtgtcctcatcttcggaggatccaggagtcacaaccacttacccctggcgtgggggtgggtgaagcccatggcaggcgaagggaaaattgcccgagagtcgctcaaagtcctcctgagagattgttcctcggccttcagggtcataattcttgaacacagacttcagaggagtgtggggaagcagataaggcccagttgtcgaaatatgatccccatggccataagtccccacctccaggctcagggttctacagatgtcttccctcctggctgctggcggccgggccaccctcccctccttacctccaccagctgctccacatgccgacccagtgtgaccctgtccggcttgggtgtcacaccaggggcccactccaccaccagaggtgcattgaagggggagggtggctggggcggggacagaggagcacagttagtcactgcataggcttagggggggttcgaggtaattgggggagtccgaggccaggggttgggtctcaccaggctcttgggacaacgcggctcccgggcataagaaagctcatagatctcgtcttccgtgtagaagaggtccagggagagctggagcagacaggggtgttacggatcctcccatctatagccctgccccagacccccacacccactcgcaggctcttcccaaagcccctcctgggttcaaatcctggcattactgctgtgggacagtgggcaagggacctcacctctctgggcctcagtttcccaatctacagaatgggcacagtaagggtcccgacctcatagggttgtaaggtggaatgaggtacctggcacacagtcaatgatcaataactgttagtagccttttgcttagattcttggatatgtcaaagcttgagattttgggctatcagcatgagaagctcagaaccttggagtttaagaatgtgaaccccaaagcaattccagagctcagatcaatggatacttgagtcattggaggaagtggggaaaaaacatgttacttaaatagaatacagagctcactctgctccatatactgtcgttttttgagacagagtcttgctctgtcacccaggctggagtgtagtggtacgatcttggctcactgcaacctccgcctcccaggttcaagcgattctcatgcctcagcctcccaagtagctgggattacaggcgtgtgccactatgccaggctaattttttgtatttttagtagagatggggtttcaccatgttgcctaggctggtctcaaactcctcaggcaatccgcctacctcagcctcccaaagtgctaggattagaggcatgagccactgcgcccggctagacactgtcttaaagacattctttgaacgatgtcattggctgtctctcctcaaccaccctctgaagtgggtccttttattttattttatttttatttatttatttattttgagaaggagtttcgctcttcttgcccaggctggggtgcaatggcgcaatggcgcaatctcagctcactgcaacctccacctcccgggttcaagcaattctcctgcctcagcctcccaagtagctgggattacaggcacgcaccaccactcctggctaattttgtatttttagtagagacggggtttctccatgttggtcaggctggtctcgaactcctgacctcaggtgatctgcccacctcagcgtcccaaagtgttgggatcacaggcgtgagccactgcgcccggctgggtccttttattattcccattttgtggataaggaaactgaggcttaagggttcagtgacttgcccaagatcacgcagctagaaaaaaacctagaagttctggcttcaaaacccatgcactccagcacttttctatcctggtcctggagacactcacacacccaggaccctatatctcagtacccttggaagcccagcctgggcggggccaggggggctcaccgtgagcaggtgcagcagatcctcattggcgctgcagggtggatgctgcccttggagggccaccagctcctgcagccgcaggtagaggttgttcagcttgggtaggtgcaggcggccgtcaggcaacctgtcgggctgtgcctcatgcagggacaccaggtccttgaggtgcacgcccagtacaggcagccggaaacccgcgcagccagcccaggtgcggcggtagcgggcgtagttgttgtgggaggcaaggagctcagtgagctccaggagggcctggggaggagggacatgggattggggcgttatcaggacagtcccatcccctgagcagcctcctgtgtgggctctaggccttcagggacccagtggcattgtggaaacctctggagcccttccatatcccatgccggtctcagcatctcccccaaactgctcttcctcttgggtccccatctcagagaagttccacaatcccccattctttggctaaaatgatttcttttatctttctttctttttgatttttttttttttttttttgagatggagttttgctgtcttgcccaggctagagtgcagtggcgtgatctcggcttactgccacctccacctcctgggttcaagcgattctcctgcctcagcctcccaagaagctgggattacaggcattgagccaccacgccaggctaattttgtatttttagtagagacagggttttaccatgttggccaggctggtctcaaactcctcacctcaggtgatctgcctgcctcggcctcccaaagtgttgggattacaggcgttagccatcaagaccggcctttttatttatttattttttaggctagggtctcactctgtcacccaggctggagtacagtgtcatgatcacagctcattgcagccttaaactcctgagcttgatggctgggcacggtggctcacacctgtaatcccagcattttgagaggccgaggcaggcggatcatctgaggtcaggagttcgagaacagcctgggcaacatggtaaaaacctgtctctactaaaaatacaaaaattaactgggtctggtggtgcaggcctgtaatcccagctactcgggagtctgaggcaggcgaatcgcttgaacctgggaggtggaggcttcagtgagccaagatttcgacactgtactccagcctgggagatagagtgagactctgtctcaaaaaacaacaatgaaaaggctgagggggaggctccagcagtcctccccctcagcctcccaagtagctgggactacaggcatgggccaccatccctggctaatttatttttaaattttttttcagccaggcgcggaggctcacacctgtaatcccagcacttttggaggccaaggtgggtggatcgccttaggtcaggagtttgagaccagcctggccaacatggtaaaaccctgtctctactaaaaatacaaaattagcagggcatggtggtgcacccctgtaatcccagctattcgggaggctggggcaggagaattacctgaatccgggaggcagaggttgcagtgagccgagattgcaccactgcactccagcctgggcgacaagagcgagactctgtctcaaaaaaaaaaaaaaaaaaaaaaaaaaatttctggagatggggtctcgctatgttgcccaggctggtctgaaacacctgggctaaagtgatcctccaatcttggcctcccaaaacgctgggattacaagtgtgagccacactgtacccagcctataattatttcttaaaaacccagattttatcaagggtgtgtcatcactctcaaaacttccctagcttagcccatcttacaaggcgctataggatcttcccagggcatcttcggcttaatttcctgccactttctgacctcagccagtcctccccatggggactgcaaagttctctgctagcctgtctcccatctgtctccctcacagtccagctccggaccagacacactgaaagcagagagggatcagcaccatgagtggatggatgacagggaggaggaatgctggcagagcctgggggtctgggatttggaggagcaaggacttcatgtggtaccaggacccctgggcaggaatggacagggcttggggaattaggtgtgggggctcaagacagctgaccacttggagctttggggagggtagtgggattcaccttggtgctgtcagggctcaggtgggcatgggagtccttgagtctggagatggcactgtgacacaggccccctgtgactgccatcagcgtgttgaaattctgcagctggtggagcctctaggaagagaagcatgcacacagggccgtcacgggagggagggcaagtcaggagttcagatgacagcatcccagttgaggtggggtcccaggcatgtgtggaccaatgtggggatcagacaggtgagagaaggcgggtgtgtgcggcaagagtgggacatgccatgtgtgggcctcacaggggtgtcagatggctatctgagccgggagggtcaagcaagtgattgactgatacgaggttagaaaatctggggagacaggaagtacgagaagttgggcggatttggggaatagacaggtgtgtgtcaggtggaggaggcttcagacatgtcagggtgtcagccatctgggggtctgactgctctgagagtcacacaggtgcggggaggcaagaaggtgcaggctctgggcaggagctgggagccaggcagaggtgaatagggccagagagatatggaggagtcagacagatgctagacaggtgtggggccaccagggcagctggggaattcccttgccctccttttgacaaatttcggcagaggttgctgtggagagagtggggccagggaggaatggaaaatgctcagactaaggacaccccaggcggacgtcgagacccccaggtctcaggggccctgcaggagtaagcaagccagggaagacaccagaggaagggcgtggtctgcgtggaaatacgcaagggggcgcggccacagcggggccgtagggcttcccttttccccagaagggcgagaaggtgtccggaaaggagggggaagggaggggaagagaagggcgtaacacaatggggcggggcggggagagcccggacgcaatggggagcgatgcacaatcccgaagcgaccgctggggcctggggactggggattgaagcctcgggcttccatgccccacaaaggtgggggcatggaagagacactctcattgacctggggatagaatattcgggcatagggcttgggagcctgtcacgtctagggccaaggggtggggccacggtgggtgcgacgcggtgacatcaaggccaaagaagaagttacggtccttggttggaatgcccaggctgtggcctcgggggcggggccgggagatgcgtgacgtcaccgccgggatgaccctgtggggtcgagggtctggaaggggaaggaccaggtggctgcgtgcagtggagttcgcagccccaaggggcgggcctcacctgtgccacgtgaatgaacttgtccagcacctgtgcacgctgtaggggcccgggacggctcagcaccatcacctgcacccagcgggacacgctgttgctgagacctacggagccctccagggccgggcagcctcgtactgagccctgcaaaacgtagctccgcaggtcctggggctgggagcgaggtgggtgtcaaggtgggccgtggcgctcaggccctgcccttccatggcatccaactagcagtcacgatctctgatgtcctagcctggtctagccggagtgacctttgtcatctgtcccccaaccctcaggctgctacatgtccttaacgtcaccatgctcctctcccatctgaggaggcatgtttcaatatagccaggcactatatttgacaagtaatcatattaaataatttaatcctcataactctatgaggtgagtatcattccattttagaggtgagacagttgaggcacatagaggataggtaatttgcccagggtcacacaggtgtgagtcagggtgggcgtctatatgctcttaactgtacacctgactggtatacagtaagcaaagggaaggctggggaagatgaattgaaatcaacctctatctgttctgcccaaggagtgttcatttcatacccacatccactacactgagtatatttgcatacacactcacacacacaacacacacatacaatcgggacagtttcacatgaaggaaacagatccccaccttcccttgaaatgatgatgtccagatggcaaaagctaatgcatatatatgttgaagcacatgaaactgatccttgggtaggtaatatatgacaatttcaaatggttcaagcagatagcatttaccctggaccaggcactgttcctgcaaggcaggaactgtgcatatcccctttttacagatgaggaaactgaggcaccatgaatttaaatgcttgttgaataaatgataaaatattttgagcacttactaagtgccagtcgctgcaataagccttttatttatttattttacttttttgttgttgttgtttttcgagacagaatctcgctctgtcgcccaggctggagtgcagtggtgtgatctcagctcactgtaatctccgcctcctgaggttcaagtgattctcctgcctcaccctcccaagtagctgggattacaggcatgcaccaccacacctggataatttttgtatttttagtagagatggggtttcaccatgttggccaggctggtctcaaactcctgacctcaggcgatctgcctgccttggcctctttaactcattttcctggaccttctagcatacaggtttgagtttaagactttgagatctctgccgaatgaccatgcaggtgtcctctcagtcctaccttcccccagccaatccctcccctaccccagtgtctcccctgcttgggacggggatgggagggggtcctcaccgtgatagcctggaaggaccggaactccaggtaggtgaggtgctgagccagctcccccgtctccaagtggtcgaaaagcaaggacactttgcgctttttgcccaggcctgggctgctcattgggagtggggggccagggccaccagggctcaggctgggggccaagaggggcagggtattggagtggctcacagttgagggcttggggatatagagggagatggcagaatggcgatggggcagggaagaggggagcacagggctgactcacaggtcagaagagtctcccagtcttctctgggctgagttgccctcccgggccacggtggcccagaaacgacctatgacttcttctagctggggatcctggtgcatcacctcagggtgtcgcatcagccagtacctgagagtggtttggagatggtgagatgaggccgggggtggcgaaggtctctacaaggggtattttgggctgaggaatttctaggtgctgagctagggggtctctaaatgtgtgtgggggtccctggagggttggggtttggaggggcaccaggcttggagaatctctggagtaggatgggggtctcttaacagagactggggggatctgtgggaaacagaccggggagtcacttggaagtgggattattgggaagcaagatcgtggagcgtcctaggaactagactgggggcttccgggggtgaaatttttggagggacagaatgagggggtcttatgggctaggctggggtctgtgggaggtagagattttggggatcagagttggaggtctctgggcaccagctaggagggtctatgggatctggttggtgaggggggtctctaggaagtgggggttctaaggaacggaactaagagggtcttaggaaccaagctacaggtgtctcagaagtgggattttggcctgtggggctggttgggtctgtgggaactggcctggggattctctgaggaatgttttttgagggggaagcaggatggaagtcgtgggtcctgagagtggggatctcggcccagccctacctgaccaggtgacagatctgcagccgtctcagctcctgggtgtcccctgtggccttctggtatttgagttctggtcaaggctctgttttccaggatccatgacctgcctgctccccattcccattgcccaggttctcacgactctgccctctgccctccacccatagctcacagtcctggaggatatgaggtcagcaggcgggcagccaggtcggcggacggcagcacccagctgtgcatggccagcaccatgttgagcatgtggtcctcgtggcacaggctgccagctgaatctggggtggaaggaggggtactctgtgacagaatggccctcaagcaatgcagagcgtagctccagatcctgccggaccacctggttcaaagaccagctctaacggtgatccccagcatgaccttggacaggcaacctaacctcctgtgcctcagtttccttatctgtattgtgcatggggcagcatcacccctggcaagtcttgctgaagattgaaatagcaccagactggccgggcacagtggctcacacctgtaatcccagcactttgggaggctgaatcgggcggatcatatgaggccaggagttcgggacaagtctggccaacatggtgaaacaccgtttctactaaaaacacaaaaattagctgggcctggtggcatgtgcctgtaatcctagctactcgggaagctgaggcaggagaatctcttgaacccaggaggtgggggttgcagtgagctgagatcaggccactgcactccagcctgggtaacagagcgagactctgtctcaaaagaaaaagaaaagaaaagaaaaaagatttatataaatatatataatatacacatatattatatatatatataaatgtatatatttccatttcaggaaagaagaaatgcaggtgtttctgttatctctaatgtagtgattgagtttcattccacccagccctgttctcattttacctccaaaaactgaggtggagagaagcgagtgctgagcccgaggttagggccagggaggctgctggggagaggacacttaccgaaggactggatgcatttctccagcagctcatcttcgctgcagccgccctcactcagcaggcccaggttcatggaagccatgaccttgctgatttcccgagggctggggcatgtcttgtggcggcgcacttggcggggccggcctcgccctcctatttttccggtgcattcctggtgggacttcctgtgggcacagcccccaaggagtcatgggagcaccttctttcggacagaccctagaattccttttgactctaatgccccaaggcaccacgggagaggcttcctaaaggcaaagccccagggttacccctgacctaccagggactctagagagaatccccaggaatattccagatccctgggggaatcatgggagccctctcccacaagcaaactcccagggatattcctgctcccttcagggaatcagagaggaagatcctcaagaccaggggtccccagcccctgggacacagacaggtaccagtccgtggcctgttaggaaccagcgggcaagcaagcacccccgcctgagctccacctcctgtcagatcagctggggcattagactctcttaggagcatgaaccctattgtgaacttcacatgcgagggatctaggctgcgtgctgtttatgatgcctgatgatctaggctgcgtgctgtttatgatgcctgatgcctaatgcctgatgatctgtcactgtctctcatcacccccagatgggagcatccagttgcaggaaaacaagctcagggctcccactgattctccattatggtgagctgcgtaactatttcattatatattacaatgtaataataataaaaataaagcacaggatacatgtaattaacttgaatcatccccacaccatccccacccccttccacaaaactggtccctgatgccaaaaagcctggggaccgccgctcaggactgctctgaatctcccagggaatcacagtagaagacccctgggaccactcaagacccctcagggaatcataagaactccttccccaggcattgcccccaacttcctcttgactgcttccagggcatcctggaagagacttccttttggcagatcccaggattactcctggcctaccagggactcgggagaagacccctggaatctcttctgtcctccccaggcagaggcatgggaggacctgccttcaggaattgcctcctcagggctcccgtttggtctctaacaccctcccctccttcctcccacagccctcaagagagcaaggctcttggaccagtgtgatggctcacgcctgtaatcccaaagctttgggaggccaaggtgggtggatcacttgaggccaggagttcgagaccaccccggccaacatggtgaaacccccatcgctactaaaaatgcaaaaattggtcaggcgtgatggcgggcgcctgtaatcccagctactcaggaggctgaggcaggagggtcgcttgaacccaggaggtggaggctgcagtgagccggaactgcatcactgtgctccaacctgggtgacagagtgatttctgtttcaaaaataataataaaaaaattaaaaagagaggccagtcacagtggctcacgcctgtagtcccagcactttgggaggctgaggtgggtggatcacttgaggtcaggagttcgagaccagcctggccaacatggtgaaaccccatctctattaaaaatacaaaaattagccaggcgtggtggtgggctcctgtaatcccagctactcaggaggctgaggcagaagacttgcttgaacccaggaggcggaggttgcagtgagccgagatcgtgccactgcactccagcctgggcaacagagcgagtcttagtctcaaaataataataataataatagtaataatagtaataataattctccctctgcctggtgcctcccagaggctgctgttcctgataggggaagagggtaatggagagacaaggatggtgggagcagggaggctgctgaatccaagcttcagacgaaagtagaatccagaaatttttgccagctgttgtgacttcgtgttagtcacttaatttctctggggctcaatttcctcgaaggaaaaatgaggatagtccttggaccttctccagggatttcttttttctttctttctttctttttttggagacagggtctcactctgtcacccaggctggagtgcagtggtgcgatctcagctcactgcaacctccacctcccgggttcaagcaattctcctgcctcagcctcccaagtagttgggactacaggcacgtgccaccacgccgagctaatttttgtatttttagtagaaatggggtttcaccatgttggccaggctggtttcaaactcctgggcccaactgatcctcccacctttgcctctgaaagtgctgggattacaggtgtgagccatcacgccaggctcccacctctaccctttttcagacagggtcttgctctgtctcccaggctggagcacagttgtgcaatcaaagctcattgtaaccttgaactcctggactcgagtgatcctcctgccttagtctcccaggtagctgggactacaggtgtgcacgaccatacccagctaattttgtgtgtgtgtttgggtgtgtgtcaatgggggggggggtctcactatatttctcaggctggtctagaactcctggcttcaagttctccttgtcttatcctcccaaagtgctgggattagaggcatgagccatcgttactagaagggacattttaaagtattatatatgtcctaggctaaggaaggagcattctaactaagtcagcatttccctaagtgtgggcacccagctagtaccaaaagcatcacctgggaactggatatcaatacagattctcaggtcccaacccagacctacaaaatcaaacactttaaggctaagggtggtggctcatgcctctaatcccagcactttgggaggccgaggtgggtggatcacgaggtcaagagatcgagaccatcctgcccaacatggtgaaaccccatctctactaaaaatacaaaaaagtagctgggtgtggtggtgcacacctgtagtcccagctacttgggaggctgaggcaggatgatcgcttgaacccgggaggcagaggttgcagtgagccaagattgtgccactgcactccagcctggcggcagagcgagactccgtctcaaaaaaaaaaaacaaaaaaaaaaaaaccaaacactttaaaggtaagcccagcaacctgtattttacaagccctccagacagttctgaggctcgctccagtttgagaaccactggtctagagtgtctcattgagtacttacaggcctctccgaggtagaggatatgattgttctactgacagaagaaaaacccgagacacagagcagttaagtgacttacctaaggtcacacagctaggaaattaggcagccaggagtctaccactaaactgctgggtggggaggaaagccctttgcccatcagagtggtgctgggggtggcaggaggagttacccaggctagggagccacccaccatctgcctctgtggggacagaagggccagcttgcccaggagatgaagcccattccagaaccggccgcacagccagccactaggccctgtcctgcagccccctgtaggggtctggaacagccaggagtggtttaagaggcaggggagtcgccttgccctgtgccacactcccctctcctgggccaggccctgcaggagcctggagtttccagtccacggggatggggaaccaggaagcccccagggagggcagagacactcagcccaggccagggatggaggtggggtgatgaggagtggaaaaggggcacggagcagctcaaactccagggacaacacggtacagatgccacatacaagcgactgcagccgtagctggctccagactccctgaagcatccacctggcccccctgcgcctgatcccaaagaagtcaggaatcctgccaccctggcgagtgatctccccagccctcccatgcagagggaggcctcagggtgctgccgggctccctggggagggtcctctcacctcttactgtcttttctgttcatgcttcccgcgtggggtgaggaggccgggggtcttgcaagagtagggctcagctcctccccttgcccaggactccagcttctcagcccctagggagctggggcctcctcggtgcttgggaaggaaagaggaactgcccctccccacccaccctcaggccagggggaaggaagaggctggggagagaccgaaggcccccctcccccacacggggatcccttctgctgaggtttccggcatcgctggctctcccaccctcaagctccccggcgggctctctatctcccccatctttcggtgtcgagacccgtcactgtcatacttcaataaaagaaggggcttttctttttaaagcatgactgatatttatgtaaaaacacacacactcactcaaaaagataagtctgtctgtctagaaggacatattcatatatataattcatgaaggtttgaatggaaactcacaagacatagtattttgtatatttcttcataggcgtctcttattcctagtttaagtgataccatttgtaccctggaaaacattttcactttctgactttattgtaacaaacctccacatagcacctactgtgtaccacacactgctgtaaggactttaaaaatattaactcatttaatcctcacacaatccactgttaccttaaaaaaaattacataccggaccaggcacgggggctcacaggggctcacgcctgtcatccagcactttgggaggccaaggcaggcggatcgcttgagtctaagagtttgagaccagcttgaacaacgtgacaaaaccccgtctctacaaaaaatgtaaaacgttaggccggtgtggtggctcactcctgcaatcccagcactttgggaggccgaggtgggcggatcacctgaggttgggagtttaagaccagcctgagcaacatggagaaaccccgtctctactaaaaatacaaaattagccaggcgttgtggcacatgcctgtaatcccagctactcggcaggctgaggcaggagaattgcttgaacccaggaggcggaggttgccgtgagccgagatcgcgccattgcactccagcctgggcaacaggagcgaaactctgtctcaaaaaaaaaaagttagctgagcgtagtgatgcacacttgtagtcccagctactcaggaggctgaggctagaagattgcttgagcccaaggaggtcgaggctgcagtgaaccatgatggtgccactgcacttcagtctgcgtggcagagccagaccctgtctcaaaaaacaaaaaacaaaaaaaaaaaacacacacacacatcaaaaaacattagagatggaggtaaagccttggggaagcccctccccatcccctgcctttcttaagcagggtgtgaccaatatgacacgttgtcgagtttcgtccaaactgctgtctgtgcgtttaagcacatcatataaacatgtgctcctagaaacagacttttcttttgagtgtgcatttttttctttttacctaaatgtgtcatgctcgacacttttttttaaattgaagtacaaaaaagatcacgaatcattaagtatttaggttgatgaaatgtcaccaactgagcaaacctgtgtgacattcatacaaatccagacacagaacattctcaccctccacaagccccctgtctttcttcccagcacgaattcccacagatccccactcgcccgaagtctggcgcagtagttttgtcttgttttgagctggataaaaatggactcctgtattgaatctgggttctttctctccacgtcttgtctttgcagttcttccatgttatcatatttggttataatttattcctttttttggccgggcgcggtggctcacgcctgtaatcccagcactttgggaggctgagatgggcagatcacttgaggtcaggagttcgagacccgtctggccaacatggtgaaactcccatctctactacaaatacaaaaatgagccaggtgtggtggtgcgtgcctgtaatcccagctacttgggaggctgaggcaggagaatcgcttgaacccgggaggaggaggttgtagcgagccgagattgcaccactgcacttcagcttgggcgacagagcgagactctgtctcaaaataataataataataataataataataattccatatagtctttcattatgtgacaattccatgacttatatatatatatttatttatttagagataggtgttgtggatagtgactaagcgggctggtggcatgctaacttctattttttttttttatttttgagacagagtcctgctctgtcgcccagtctggagtgcagtggcgtgatctcagctcactgcaacctctgcgattgaagcgattctcctgcctcagcctccccagtatctgggatcacaggtgtgtgccaccacacccagctaatttttgtagagacggggttttgccatattggccaggctggtcttgaactcctggtctcaaataatccacccgcctcagcctcccaaagtgctggggttacaggcgtgagtcacagcactaagttctatttttcatcagtctagagtctggtaataactagacactaaaacattttaagttaagtgagttatctatacaagaggactatatgtcctagactgtaaaaaaaagacaaacttatagcttctctgttttttttttttatttttatttggtcctaccaacctgactcttttttcttaattaagactccacagcagggtctccctctgtcaccaaggttggagtgcagtggcgagatcctagctcactgcggcctcggactcctgggcttaagccatcttcccacctcagcctcctgagtggctaggactacaagtgcacaccactgtgctctgctaattttttttttattattttcctgtagaaacagggtcttactttgttgcctaggctgatctcgaactcctaggctcaagcaatcgtccttcctatgcctccaaattgctgactctccaggcgtgaaccactgtccccggcctccgtgatttattgatcaattttcctgtgatggacatctgagttgtttccaggttggggctgctgtgactatttgagcatctgacttttgatgaacatagagtgtaccatattgtagggcagtacccaggagtggaataaatgggtcatagtagttactgtgattctaccaaacatagcatgttagcaattcattgaaatcgttctctcagaagtatatttttccactttttttttcactaaaagaaagaaccgtggatgtatattttttccaatgcagaacatttagacagtcactgaactcgccgtctttagtttttccatcacgcgatgttaccatagcttcagactctctcttcctgcccgttttcaccctctctccccctggcctcatggtgttctgtctgactctctcagaccatctcctgtagcacctgcatcttgaatgtgacttaacaatcctggctgagcagagacttcgtagtgtggcagtgtctccaggccctggggacccagaaaagcctcaaggaggaggtcagaaatcctggcacttgtttctactgtacacaggcagccttagtcctcgggctggccaagaatacccacaatacccgtgctgatgactacaaaggaagggacttctgaatcaaaccacagaaactcctaaggcagaaaaatgatggacatgataacatgcaaatacagactttcttcttttgttgctgttcttctttctttctcttttaaattttaaagatggggtcttgctatgttgcccaggctggtctcaaactcctgggctcaagggatcctttcacctagacctcccaaagtgctgagattacaggcagattttcttttaacgaagacaccatgggacaaatgtcagatgacagaaggggaaaaggtgtttgcaatatttaaaaatcaatgagatattaatatctagaatataggtcaggtgcagtagctcatgcctctaatcccagcactttgagaggctgaggcgggcagatcacttgagatcaggagttcgaggccaacctggccaacgtggcaaaaccccgtctctattaaaaatacaaaaattagcagggtgtggtagtgggtattgctctgtcatcccggctacttgggaggctgaggcatgagaatcagttgaacccaggaggtggaggttgcagtgagctgggattgagccactgcactccagcctgggagacagaatgggactccatctaaaaaaaaaaaaaaaaaaaaagaatataaaaggaacagctgcaaatcagcaagcgaaaaagacagcaaccataatagaaaaatggccgggctcagtggctcctgcgcctataatgtaagattacatgcttgtaatctcagcactttgggagaccgaggtgggtagactacctgaggtcaagagttcaagaccaccctggccaacatggcgaaaccccgtctctactcaaaatacaaaaattaggctgggcacagtggctcacgcctgcaatcctagcactttgggaggccaaggcaggcggattggctgagctcaggagttcgagaccagcctgggcaacacagtgaaacccgatctctactaaaatacaaaagaaattagccaggtgtggcagtatgcgcctgtagtcctgggggtgctgaggcaggagaattgcttgaacccaggaggcggaggttgcagtgagccgagatggtgccactgaactccagcctgggcgacagagcaagactctgtctcaaaaaaaaaaaacaaaaaaaagtgagcagggatcacaatgagcagataacaaagaaacccaaaactctgataggcacttgagaagatgctagaaattgttggtaactcatcagggaagtggaaattaaaatgacagcgagtccaggcgcggtggctcttgcctgtaatcctaacactttgggaagctgaggtaggaggatcacttgagaccagcagttcaataccagcctgggcaatatagtaagaccccacctctataaaaaatttaaaagttagttgggcgtggtggcacaagcctgttgtcccagctgctcgggaggttgaggtgggaggatcccttgagcccaggagttccgggcagcagtgaaccataattgcgccactgcaccccagcctgggcaacaaagtgagatctcatctctaaaaataaaatagagaaaataaattaaaaaacagtgagtcaccctatataaatctggcaaaaattagttaagttggaaatgccacatgagggttggggatatggggacccggggaccctcatgcactggtagtgagtagccattccgagggctacccagcactacttacacaaatggtgcgcatggatatgtcacccagcaattagcttctgggtacgcacaataaaacattctccctcagcttcctgggggaccaatacacagatgttccctccagcattatttcgggagagctggaggcagcctgggtgtccgctcccagtaggggtaggtggaaaaacagaagggatcagtcaccagagaatcctgcaaagccaccactgtcacacaccaggtgtccacagagcaacaagggtaggtcttaaaacacataatgatgactgacaaaaataagaaacactattaatatcttatgatataatgctcaatgacacagaatcattttacatttacataaagttttagggaaaaacaatatttaatatacaactatgcgttggataatgtataacagatacaacatagaattgtattgtactgtataattatattagcctaaatatataattatataattatacattatataatgccaaattatataattccataatatgacacaaacttttgtgctatttattgcagttgtgttaacatcagtatttaattatggaacacctagaaacctgctataccttgaagaacggtttctatgtaattttgtttaactatgggatattgttttatataacttactgtataccactacatgttaataaaaaaaatttttttttttttttttgaggtggagccttgctctgtcacctgggctggagtgtagtggtacaatctcggctcactacaacctctgcctcctgggcttaaatgattcttgttcctcagcctcccaagtagctgggattagagtcgtgtgacaccatgcccagctaatttctgtgtttttagtagagtcagagtttcaccatgttgaccaagctggtctcaaattcctggcttcaagtgatctgtctgccttggcctcccaacgtgctgggattacaggcatgagccactgtgtctggcctagtaataattttaatagggctggacgtggtggtttacacctgtaatcccagcactttgggaggctgaggtgggcgaatcatgaggtcaggagttcgagaccagcctggccaacatggtgaaaccccgtctctaccaaaaatacaaaaattagccgggtgtgttggcaggtgcctgtaatcccagctactcaggaggctgaggaggagaatcgtttgaacctgggaggtggaggttgcagtgagtcaagatcttgccactgcactccagtctgggcaacaagagcaagagtccgtctcaaaataaataaataaataaataaataataataatagcaacacttacattacattaaccaggcactggcactgttttaagttttatctcatttaattaattatctcatttaactctcccaacaaccacgtgaggtcggtactattaatattccccttactggatggggaaaccgaggcacagagaagctaagtggcttatccatgtaactcaaggaagtggcaaggctgggtgggattcagatccagattatctggcttggagtcggagtccttgttcttttttttttttttttcagacgaagtctcgcccaggctggagtgcagtggctcaatctcggctcactgcagcttctgcctcccgaattcaaggagttcaagcaattctcctgcctcagtttcccaagtggctgggattacaagcatgtgtcaccacgcctggctaatttttgtacttttagtagagacgggggtttcaccatgttggccaggctggcctcgaactcctgacctcaagtgatccacccacctcggcgtcccaaagtgctgagattacaggggtgagccaccactcccggccggagtccttgttcttaatcactatgtttggtgctttttaaagtcaggagatctggtgcacatccctgctctgctgcgtgatatcttgcaagaacttccccactcagagcctcagtctgccctctgtgaaatgggagaatgatggcacgttacttaccgtggtggggagaaagcgcaggtacctcctagatactctctctcccaccccacctccggcggccaacggccaagcaaacctccagccaagatttggggtatgtgggcagggctccggcgaaggggagtggccggggagtcctggtccaatggggcccgggggcggggacttcctcccatctctgtccagcatgcgtgtactcctcgcagttccatctacctcgcgggtgcctctggtgtctccagaggtctccgaccccagcccgcccccagccctcccgcccagcccgcagccccctccctctgttccccgacctcagaccctgggcttccgacctcgacatcatgggtgacgcagaaggcgaagacgaggtccagttcctgcggacggtgcgtatctctgggttaggggcctgtggggctatctcttggggctctctgagggtctctctgtctctgaatgtccctgtccggcttgctggtggtctctgagactcgaggtctcttcctatgtcactttgagtgactgtcactctgtcttttagtctccttcacctttctcactacagagaattagtaggattggggactccagaatgggaaagggatcttcggttgccctctcttctgactttagcgatttgtcccccacaagaaggacccccgagggagcacaccctcacaccatcttggaagcaggcacttggggaaggtggttctaattcctgggcttgatttagccatccccccacccccaccttagccctaattctctttttgctccagactctgacctatttaaattcttgagaagggagctggagtgagctggaggacacagctgcttccaactcctagcccttgagggtcttgtgggggagggatctcttgggttctgggtctttctttccttcttcgttttgggcaggagggctgctcccaatggctgctaatggtcttgcagggtctctgggtggtgtctctccccatctgtctctttgggtgtctccatgtctctgtctcttcctccatctcagtctccctgtctctgtttcttagcttaaggccctctgattttcgctgtctctctagctgggttactccctgcatctgagccccagctgggggcagggatgggaattggaacaacaggtgtccctcccagaatagccggcttttctggggcctgggcaggggatggggaggggatgagagggaggaggggctgccatctccttgtccttcccatcttcccctcccagtggctccgcagggtgtggggtcgtaaatatgggaggggacgtcctctcctctgggctaggtctgctgaccagacgctagccccgcccctccccccggggccctggagccacacaggaaatgctgacacagcattcctgccccagaataggaccctggcgagccgggtccggtttcctgggagagaggaacaaacagctggggctggtagtgaaggatggggacagctgggaaggggcctagcttcagccgagactctctccccagccccagcccctcagcagacaccatgggtcgggccctccccagccctaataagaccatggccatggccactggctcttgagctgtcgctctaaaccaggccctgtgccctgggcctctgcctcctgagacatctaattatatccttgctgccctgtcttctgaggtagggtcctatctttatctccctgacagatttgagggaaaccaaggcccgaatggtagaatcactcacccaaggtcaaggccaggaagtggcatctctggatgcccctggtgcccagccccattgccttcaccagagaaaatctgggcccagacttgccaaagtagtcagcgttagggttctggaggcttggccctggaatctctccaccccagactgggtcagtttttctgattgttactgaggtcgtggtggatttctcaaaactttctggaggctgggctcagtggctcatgcctgtaatctcagcactttgggaggccaaggtgagcggatcacttgaggtcaggagtttgagaccagcctggccaacatggtgaaaccccgtctctactaaaaatacaaaaaaatattagccaggcgtggtggtgcatgcctgtaatcttagctactcgggaggctgaagtgggaggattgcttgaacctgggaggcagaggttgcagtgagccgagattgcgccactgcacactccagcctgggcgacagggcgagactccatctcagaacaaaaaaccttctggaccacatcccgcccataagaaacattctgtcttacaactcagtacatgcacacatgcatagacatgactaaaaaccaactttattgaggtataattgacctgcaataaattttacccagtttatgtgttcaatgagttgttttgtttttgtttatttatttatttttttgagatggagtttcactcttgttgcccagactggagtgcaatggcgtgatcgcagctcactgcaacctctgcctcctgggttcaagcgattcttctgcctcagcctcctgagtagctgggattacaggcgcgtgccaccaagccgagctaattttttgtatttttagtagagatggggtttcaccatgttggccaggctggtcttgaactcctgacctcagatgatccacccatcttggcctcccaaggtgctgggattacaggtgtgagccaccacgcccggcctttttttttctttttgagacagagtctcaatctgttgcccaggctggagtacagcagtttggtggttggttcaacgcaacctccacttcccaggctccagtgatcctcccacctcagcctcctgagtagctgggactacacgtgcatagcaccatgcttggctaatttgtaaaattttttgtagaggtgaggtctcactatattgcccaggctggtgtcaaactcctgggctcaagaaatcctccggccttggcctcccaaagttttgggattacaggcataagccaccatgcccggcctttcttctttcactcagcataatatttttgacattcatccatgtagcatgtattgagtttgttgctttttgttgccgaatattattccattgtgcgactatactgtggtgtgtttatcagttcacctgctgatggacatttgagtcgtctccaatttttactattatagacaacacagggcctgtgaccattcacttgtacctatttttaactgaaacaagtctcataaaatgtagatggcccctgaagcatgatgggcacgctgtgattttctattcttgctccattttgcttcgtttggttaagtatgatggccacagcccccccaaactgatttcacttccctttggtgggtggtgacctctacccttacccaggctggggtttctcaaaccctggcccaagttagaagctcctggggtctggtaaacagtacgtattccctgctgaccccaaatcaggctcttgatggtggtaggggactgggccagcagggaagctatatttttaaccagaaccctccgcttccttcattttttttttctttttcttttttttttaagatggagtcttcctttgtagcccaggctggagtgcaatggcacaatctcggctcactgcaacctccgcctcctgggttcaagcgattctcctgtctcagcctcccgagtagctgggattacaggcatgcaccactacgcccggctaatttttgtacttttaatagagatggggtttcaccatgttggccaggctggtctcgaactcctgacctcaagtgatgcgcccaccttggcctcccaaagtgctgggattacaggaatgagccacctcgcccagcctgccttcattctaattcaggaaaagtttgagaatcaatgtggtaatgattgggctctctgtcgctgctttgcactctggctttgccatttgcctgcttcctaatttggggcaagtgatttttatttttctctctgagcctcagtgttctcatctggaaaatggggacaagattatatacaatagccagaccccatggctcacacctgtaatcccttcgctttgggaggctgaagcaggacgattgcttgaggccgggagttcaaaaacagcctgggcaacatagggagaccttgtctttacaaaaaatgttaaactttagctgggcgtggcagtgtgcacctgtagtaccagctacttgggaggctgaggtgggaagatcacttgaaaccaggagtcggaagctgcagtgagctgtgatctcgccactgcactccagtctgggcaacagagcaagaccctgtgtctacaaaaatatatatatcttaaattagctgggtgtggtggcatgagcctgcagtcatagcttctcaggaggctgaatggagaggatcactcagcctaggagtccaaggctgcagtgagctatgatcgtaccactgcactccaccccaggagacagagtgagacccagtctcttaaaaaaaaaaaaaaagttatttttcaaggggcccatgcaagtatctctctgacctcatctcctccctgtttgcccctcctccttgcggccaccatcctgctccatctcctgtgctgtccctcaacaccccagcacccagactccctcctcttaccccagagatgagcaggcctgattccttcttgttatttggacaaggctcaactcaaatgtcacctccttggagaggctgtcacttcactccctcactgatctcatccccatcctaaaagccactctcttacatcagcctgggttattttttctataacacctatcactgacattaacattacatattaattcacctgtttattccctgtctccaccatgaggatttaagctccctgagggccgtgattttttttttttccttttgagacatggtctcaatctgtctcaggggccccagggaggtggggcttgattatgactcactgcagcctcgatttcccaggcttggcagtcctcccacctcagcctcccgagtagcagggactacaggaacataccaccatgctcggctaatttttaatttttaacttttgtagagatgggggtctcattatgtatattgcccaggctagtcttttttttttttttttttttgagatggagtctcgctctgtcacccaggctcgagttcagtggtgcgatctcggctcactacaagctccgcctcccaggttcacaccattctcctgcctcagcctcccgagtagctgggactacaggcgcccgccaccacacccggctaattttttgtatttttagtagagacggggtttcaccatgttagccaggatggtctcgatcctctgaccttgtgaccctcccaccttgtcctccgaaagtgctgggattacaggcgtgagccgccgtgcctggccccaggctggtcttaaactcctgggctcaagtaatccttctgcctcagcctcccaaactgttgagatttgcaggtgtgaaccaccgcgtccagccaaggcagggatcttgatcttcattgactttattcactgctctatatttagtgcctagaacagcacctggcccatggcagatgctcaaccaaagtctgttaaatgagtgtaaggcccagagcataaggcctgggagccagtaaagtgcctaataaaaacagcctataccattactatttttttttttgtttgttttttgagatggagttttccccaggctggagtttcactcttgttgccccagactggagtgcaatctggtggtagcaacctccacctcccaggctcaagccattctcctgcctcagcctcccaagtagctgggataacaggcatacgccaccatgcccgggtaattttgtatttttagtagagacagggtttctccatgttgttcaggctggtctcgaacttctgacctcaggtgatccacctgcctcggcctcccaaagtgctgggattacaggcgtgagccaccgcacccggctatttttggttttgtttgtttgtttttgagatggagtctcactctgtcacccaggctggagtgcaatggctcgatctcagctccctgcaacctctgcctcctgggttcaggcgattctcctggctcagactcccgagtagctggaactacaggcgtgcaccaccacaccccgctaatttttgtattttttagtagagatggggtttcaccatgttggccaggctggtctcgaactcctgacctcaagtgatccacctcctcggcctcccagagtgctgggattataggtgggaactactgcgcccggactcaatactgtcctttatggtacttccaggatccagcccgggctgtcacattgcattcaggtgccattagaaagcagtctataaataaagataaaatagcagtctattattaaaacaacacgcaaaagagagaatttagagaaagatgagcttaaaaagcaatttaacttgagcaagtttccaccttccagtggatcactttgcagaccccacttgggaggcctctggagccagttggactgaggttcaaatcccagctcctcctgttaccaactgtgtggccttggtccatctgtgtcccactttgagcttcagtttccccattttaaaatggggataagccaggcacaacagttcatgcctgtagtcccagctactcaggaggctgaggcaacaggattgcttgagtccaggaggtcaaggttgcagtgagctataatttacaccacttcactccagcctgggtgacacagcaagaccctgtctctaaaaataaaaataaatgggatgattacttgaggtcaggagttcgagagcagcctggccaacatggcgaaaccttgtctctactaaaaatataaaaattagccaggtgtggtggtgcacgcttgtaatttcagctatttgggaggctgaggcaggagaatcgcttgaacccaggaggtggaggctgcagtgggctgagattgcaccactgtgctccagcctgggcaacagagactatttcaaataaataaataataaaaaataaaataaatgggatgatgctggcttgtatctcaaggagttgtcaggagcaggtagagggcttgggtgggttgatcttgtcagtcactgtctttttcataaggaccagggtgggaggaggggcctgtggtctgcagtatttgtggtatccgggccaggcccccctggagacgctgcccctcggttccgcaggacgatgaggtggtcctgcagtgcagcgctaccgtgctcaaggagcagctcaagctctgcctggccgccgagggcttcggcaaccgcctgtgcttcctggagcccactagcaacgcgcaggtctgtgcaggagggagaggggcctggggacaggggcgtctgaaggggcagagaatcttgggtccaaagaagagggttctgggagtctgaaaggaggtgctgacaggagagaaagtgaggaggggggctaaggctaagaggggctacctgaggtggggaggggtggaggtctgagaagggaggggcagggggtctggggtgttggagggaatccctgtgtgcacagaagtgtggtaggccagggcgggggctgctgatccagaacgttccttggcaggtggctgagtgggcagaaagcctcgggtttaaggggaggtagcctgagagtccagaagaagggctggttggggaacgggtctcaggagggaggagcagggaaactgagggacggctggggcgtggggagggggggtagggagggacgaggcaaaggacctggagcacaaggaggaggggttttattttttatttttaaaagtttttcaggtaacaagactgaattattatggggtgttttagggggaaggaggccctcggcgggggcgggggaggatgggacagggcctgagatgcggagggcatctgatgggggtgggggcttgagggtcttaggtagtggagtctgagggaaggtgatccccaagtccgagctcgggaattctgagggtgggggcagctggagtctgagagggcaggggatcgaggggccgagggccttggatccaaggcaaaggggcctggagggtcaggggacacccgcaggggcctgacttgggagactgggggctgagaggtggaaggagcctggggtctgaaaggaggagacctggaggaggggcaggggctggcagaccaggggatgtggaatctgatgggggggaagtttcagagtctgagcgagtggggtctgaggagcagagtcttgagtttaggagttggacggtgggagactgaggagggagtataaggttgagcgccctcctgtgtctgtgaagcagaggtcagaggtgtttgaaggaaaaggcaggagcgaggactgtgtgatggtggaggcaggaggtggggcttcctttggggttggagggatgtggggtcatctgcagaggaggacacagaacaggagattcctgtccttggagcagggtcagtgtgtctcaggggagaggcatgggggtgaggcttcctatgagattaggtggaacacgggttagtggggagggttagggttagggaagtttctatggagtctgggtgggtctgaggtgtttgagggaggaggcacagaagaggtgttttcgtgatgttggtctagattcagtgtgtctgagggggatggcagagggcagggccttcctgtggggtgggggtggggtctggcgtctcaagagtgtgggcatccagactaggggagggagtgtggcagggaatgttgctggggtgggggggtcttctgacccctcacttacatccccctcccaccccagaatgtgccccccgatctggccatctgttgcttcgtcctggagcagtccctgtctgtgcgagccctgcaggagatgctggctaacacggtggaggctggcgtggaggtgaggaccccacctgggggtgggcggggtggcagagatgggcgagaggacccaggggtcgtttagggcacggtggcaaggatgggtgagaggacccgggggtcgcttaccatctgctcttcttcctctctctgccctgccccccacaggccctcaatttggataagtgggtaggtccggccttggatgtcacctgtccttccacccctcctgaccccaggcaggcccgtctctcaggcccacgccctgcacacaggggctggagggtcctcccccaccccagttgtcaggggctgtggagcccagaacaggccaggcaggaaggaaggaaggggatgggggcttctgagcccctgtccccgacgcctgctcctttctcctctttccagtcctttcccccaaccctgatcccagctcctctccgcatgggacctctcccacctcccccatcccaagcgtgagtccctctggtccaggagtgggtccaccatgtgatcacctggccccatcacatggtacccccatggcgcccttggagcatgggcatgtgacagccatgatgggaggcatggtgacatcgagcagtcagatgtctgccccaaggtccgggttggggaccttgtgctggggaggggcggctgtcttagactgcgggtgacattcacctatggaacaactgctaggcctgtcccagagcacacgggctgcagcgcagcatgatgggggaggtcagagcagaggggccagagtacacggaacacgagatcttgggggtgtcctcagggtccccaggaaactagaagacgggttcattctcctgagtgatttccagccaaggtgaaggcagcagagaggacagagtgggctttggggaatataaaatgctccatccataggcatctcagagatatagtccctgcttccgtgaatggggaaactgaggcagagagtcctgcaggagtctgagctgaggctgttttacctctaggcctgagcatggtattttacagggagcatcttgtcacctgtgactaggccagacctcttggggatctggagagtccggggatctgtgcttattctgttccctccctccccctgcagtcatcccagggcgggggacacaggacgctcctgtatggccatgccatcctgctccggcatgcacacagccgcatggtgagtgcaacctcggtgggcgtgggcaggggccagggcatgtggggcctgctagaaggaggctgacctccctctacaaccctagtatctgagctgcctcaccacctcccgctccatgactgacaagctggccttcgatgtgggactgcaggaggacgcaacaggtgcagcagctggaggggatgggggtgtgaaggggccccgcagcagggattcagggggtagaaggtctgcagaacgccaaggcaagcatgagactaccctggggacatgaatgggggcttcgtagcagagagtctgcggtacagtccagacagggagacagacacacgttggggaccactaggcagagagtctgaagtcaggaacggggaactgttaggcagagagttggtggcagtgataggagagttgtgggccaagggcccgggaggcctggtggagggagagccctggggaagagcattctgggaagccatcatctgacagccacccccattccatccccacccataggagaggcttgctggtggaccatgcacccagcctccaagcagaggtctgaaggagaaaaggtccgcgttggggatgacatcatccttgtcagtgtctcctccgagcgctacctggtgagccattgcggttcctcctgctcccaggtctgggggcgcatgggatggtccccatcttctcaccatgggtttgcctggctgatctcccacccccaaggtcctgactcccaatttcccatttcctgacccctgacatccaattttctgatttctgacctcccattgcccgacttgatcatttcctgatctgtgatctctgatgactctgtctcccatctgccggtttccgggtatccacccttgatttctggcctctgacgctgggactctcgcccacccctgcaatcgtctctgactgccgcatcctggtggcccccagcacctgtcgaccgccagtggggagctccaggttgacgcttccttcatgcagacactatggaacatgaaccccatctgctcccgctgcgaagagggtgagggccccagacctccccctaaatggagatccccccaaaacagacccttaatgttgcccttcaggcatacccaaatggagccttggaacctcagacctcaaacctagatctccaaattatggctctcacacttagatctccagctgaccccaaatccagacccccagagctcagaacccccccaaaccccgaactaaatatcaggctcccaaacttagaccccaaagtattagcccccaaggctcctaaactcagattcaaatcttaaaacatcaagtttaaagcttgtttaaaggccgggcatggtggctcacgcctgtaatctcagcactttgggaggccgaggcaggtggatcacctgagttcaggagtttgagaccagcctggccaacatggcgaaaccccatctttattaaaaatgcaaaattatctgagtgtggtggcatgtgcctgtaatcccacctactcaggagggtgaggcaggagaattgcttgaacctgggtggcagaggagcctgggtgacagagccagactctgcctcaaaaaaaaaaaaaaaaaaaaaaaaaaattaaactccttagacaataagcatagactatgatctcagcccctcaaacccagacccccaaattcaaacctcagatccccaaaccaagactccaatcttcagccctccaacctcagacttccaaacttcaatttcaaatcccaaaaaccaaaatccaccaaagcaaactcccaattcagattcccatgctaagactccaggcatggcccaatactttgaccccaagtctcataccccaaacttcagagtcctaaaccagacccacgctgggactcaaaccacagatggtttttgaccctcaaactcagaccctgaaactcagactcatcaacttctaactacaaagctcagatcgttcctacgtcataccccaaagctcagacttccaaaccctagattgtaacctcagatccccaacctcactttccagcttctggcctccaaaatcaatactcaaggccaagcgcggtggctcacgcctgtaatcccagcactttgaggggccaaggcgggtggatcacttgagatcaggagttcgagaccagcctgggccaacatggcaaaaccccatctctactaaaaatacaaaaattggctgggcatgatggcgggcggctgtagccccagctacttgggaggctgaggcagtattgcttgaatctgggaggcagaggttgcagtgagccaagattgcaccactgcactgcagcctgggcaacagagcaaaactctgtcttaaaaacaaaactaaacaaaacgaaacaaaaaaaccctcaaaattcaggccctaactccagaacccagcctcagacccaaccatcacccttctaaacccagaggccaaacctcaaccctagaactcagactccaacaccagtgaacattagacctccacctttcaccacacacacactctgaccccaacctcaaaagtccaaactcagaaccttaaatgacagactcacaactcccccagcctcagctctgcagacccagaccccccaaattaggtgcccagcttcagaccccaagtctcatatccccacttcaggcctcaaccttggcctgaaaataccctgaaactcagacctccaactgcaaaaccccaaactcagccctcaggttcccccaggggaggagcagggcccctgacttcatcttggctcctggtcttcctggggctccagcctcccattgaccaacttcccttgctcctctccaggcttcgtgacgggaggtcacgtcctccgcctctttcatggacatatggatgagtgtctgaccatttcccctgctgacagtgatgaccagcgcaggtctgggctgtggacgagagggcctggggtctaggggtggacgtggagggctgggaccctatgagtaggattagggaccagattccggggagctgaacccttgacttcactctcttctgtgtccccagacttgtctactatgaggggggagctgtgtgcactcatgcccgctccctctggaggctggagccactgagaatcaggtagggcggggaagatggggagagaccagggagaggctggggtcacctggcaggctgggaggacagaaaaggtcttgagggaagatctgataaagagactgaagggtctcgagggaaaatcagagcagcctgagagagagatgaaaatctcggccaggcgtggtgacttcatgcctgtaatcccagcactttgggaggctgaggcaagaggatcactggaggccagaagttcaaaaccagcctaggcaacatcatgagacccccgtctctgcaaaaaaaataaaataaaataaataaaataaagaattagccgggtgtggtggtgtgcacctttagtctcagctactttgtggggctgaggtgggaggatcactcgagcccagcgggtcaaggctgcagtgagctgagatcctgccacagtactccagtctgggtgacagagcaagatcctgtctcaaacaaacaaacaaacaaaacaaaaacaaaaagaggccaagcgtggtggctcacgcctgtaatgccagcactttgggaggccgaggcaggtggatcacttgaggtcaggagttccagaccaggctggctaacgtggtgaaaccctgtctctactaaagatacaaaaatttgcctggtgtggtggtgggcacctgtaatccttgctactggggaggctcaggcaggagaatcccttgaacccaggaggtggcggttgcagtgagctgagattgcaccattgcattccagcctgggcgacagagcgagactccatctcaaaaaaatacaaaaacaaaggccgggggcggtggctcacacctgtaatcccagcactttgggaagccgaggcaggtggatcatttgaggtcaggagttcaagaccagcctggccaacatggtgaaaccccgtctccactaaaaatacaaaattagccaggcggtagtggcacgcacctgtaatcccagcttctcgggaggctgaggcaggagaatcacttgagcctgggaggcagaggttgcagtgaggtgagattgtgccactgcactccagcctgggcaacagagtgaggccctgccttaaaaaaaaaaaaaaaaacaagcaaaacaaaaataaaaaatgaagtctctctggagtcctgtgggaaaaggaggtttggggggtttttgagggagagattgggggccctgagtaaaatgatgggggaatttaggggtctggaaaaacgagggcactggagacatttgggaagccctgaggaagctgtgaaggcctgagagaggattggggttcctaagggaggactaggggtcctaattaagatggtttgaggaacactggaagagggttcggggcttgaggaggtttggaccaagactatagtgtccaggccgggtgcagtggctcatgcctgtaatcccagcactttgggaggccgaggtgggaggattgcttgagccctggagttcaagatcagcttgggcaacatagcaagacctggtttctgtaaaaaaaagaaaaagaagaaaagactgtaatgtccatgggagaactggggggtcctctgactccccttggctctcaccctccacagctggagtgggagccacctgcgctggggccagccactccgagtccggcatgtcactaccgggcagtacctagcgctcaccgaggaccagggcctggtggtggttgacgccagcaaggctcacaccaaggctacctccttctgcttccgcatctccaaggtcagtggggtttgtggcgccctccctcacctgaagcccccagtcccagcccagcctgcactctgcagtccctcaggggggctcccctgctaaacacacaggcagaggaggctgacctgtgtcccctgcccctgtaggagaagctggatgtggcccccaagcgggatgtggagggcatgggcccccctgagatcaagtacggggagtcactgtgcttcgtgcagcatgtggcctcaggactgtggctcacctatgctgctccagaccccaaggccctgcggctcggcgtgctcaagaagaaggtgggtgtaatcccagctactcaggaggctgaggtgggagaatcgcttgagtccaggaggtcaaggctgcagtgagctggtgatcatgccactgtactccagcctgggtgacagagtgagatggggtgcaggagggtactgaggggtggtgcttgagaccttgggagtttgaggatgagactgagagaaagatagagactgggagagaaactgagactgagagaaacagcaaaaaagacaaagggatatatctacatggagagagagagagagcagaaatctgtagacagacagggaaaggcagagataaagaggcatggaaacagagaaatagagaaagatagagacagagaaacagagacacggccgggcgtggtggctcatgcctgtaatcctagcactttgggaggcccaggcggttggatcacctgaggtcaggagtttgagaccagcctggccaacatggtgaaaccctgtctctactaaaaatacaaaaattagccaggcgtggtggcagctgcctgtaatcccagctactcaggaggctgaggcaggagaattgcttgaacctgggaagtggaggttgggagtgagccaatatcgtgccattgcactccagcctggctgacaagagtgaaactccgtctcagaaaaacaaaaacaaaacaaaacaaaaacaaaaacagagagagtgagaaaaagatggataatgaccaactgagaataactttcaacaaacaattactgagtacccgcgttgttctggttgtgtgtgcagaaaatagatgagctgtagcgacctgttccctgccctcccagtgctcagaaattgtgaacaaactgcctttagtgaagtacatagttttacaattaaggagtgggaaaactatttttggcagcaggaacagcatgtgcaaaggtcctgaggttaacatgagcttggcttgttgcagtagcagaaagaagccacagtgtggaacagggtgagcaggctggagtagtggttggtgaggaaagagaggggatgggaacagctcgtgtgaggccttgtgggccatgggagaggtctagttttgtttgtttgtttgttttttgtagagacgaggtctcattatattacacaggctggtctcaaactcctggggctcaagtgatcctcctgcctcagcctcccaaagtgctgagattaaagtgaagtgtgagccactgctcctggccaggttctagtttttatcctgagtgagatgggctcacaggagattttgagcagggcagggaagtgacctgacgcaggatcacagaattcttaggctgtctctgggaacagactacggtcaggggacagagccagagcagggagaccagagaagagactgccatgatgttacaaatgggagatgacagtggacaggaccaggaggggactgtggagttgggaagagtagtagattctggtggggtcctgagggtagagccaacaggatttgctgacagattggctgtggggtgagagaaggggaggggttgaggatgatgccatgattttttgccccaagcaactggaaggatggaagtgctgaaacagcctcattgtctggagtatcacccaaggtttgtggtctcacagccacagagaacaaggacgcagacacacaaagagtgaggttaagaggggacatttaataggcgaaagaaggagctctctactgcagagaagggtcccagaaaaatgggttgaaatgcagggggttccatggtgaaatgcagggggctttacagatgagctggtggggaggtggtatctgatttacctagggtgcaaaagactggttggaccagttgtgccatttgcatagggcacaaatttctggctgcctccaccctaagcttttattgtacaagcgggtcctctgcctgagctggccatgttgcccattccttttctgtacaacgtggaaacaataaataaataaataactaaataaagggaagatggagcctccatgttggacatgcgtagccccaggtataccttttctatcggcacattcccccatgcaagcttgtagctcgattttccaggctgctctttgttagaaaagaaattattttgggggctgctttccgttagaaaggaaactctgccgaggactctgttgcccttactctctgcctaaataatttttttctacctcttgtatcagtgccatcaaccaagttaggggacagtcagtgttggctcagaaggacagggatcttaggctttactgccagtgcctagaacagagccacttactacagccttgctgaatggacaagtaggaatccttggggaggcactcgtttgcaaaaacaggcctgtagttgaatacatgagccaagggcgtagagacggggcctgggccatgtccaaagtggggacacgtgagcatcatcagcaggtggatggtgtttacagccgcagactggatgagttctggggaggtcggcttggggtgaagctggcagccatgatggtctcacctcgtggaaaggtggtctggcattctatctgggacaggttcaatttgggggttagagctttctggtcggggggaatgttaagtcagcagtaggtacaggtggaaagggtctggcctggagacagagacaggaaggagatagggatagagagatagagagggagaggcagggacagaggtgagagagatagagagacaaagacagacaaaaccaaaaacagggacagagagagacagagaggagagagagaatcaaagacacagaggagacagatgacgggggacagaaaaatgaggaggaatttgcagtgagattctgcagagcagggaggagggggcaagtgcagaactcaagtctagacagacgtcttgggggcatggccctgggtggctgggcccactccagacctctgtctccccactcctaggccatgctgcaccaggagggccacatggacgacgcactgtcgctgacccgctgccagcaggaggagtcccaggccgcccgcatgatccacagcaccaatggcctatacaaccagttcatcaagtgagcaacctgccctccctgctggggtgactcctgtgctgtcccatgctccgggcatccatacacttggcctctttcatctctacctctgttgcccacacccttgtctaacatatacatgggccaagcgcagtggctcacacctgtaatcccaagactttgggagggcaaggcatgaggatcgcttgggcccaggagcttgagaccagcctgggcagcatagggagaccccgcctctaccaaaaaaaaaaaaaaaaaaaaaaaaattaggctgggcacagtggctcatgcctgtaatcctagcactttgagaggctgaggcgggcagatcgcttgagcccaggagttcgagaccagcctgagcaatatagtgaaaccctgtctctataaaaaaaataacaaaatattggccaggtgtggtggcacgtgcctgtagtcccagctgcatgggaagctgaggaaggaggattgcttgagccgagggggcagaggctgcagtgagccactatactccagcttcactgacagagcgagacccttctcaaaaaataataacaataatatacacatgacccctaacctctaaactcctgacctctgtacacttgacccctaatctgaccttgacaaccatgatcacattcctgatcatcacccaactttcacacccctgacacccagagcctggaccctggacctctccatccctgagttccgggacccccctgtacctacacaggagcgagtcccagtcccagctctgcccttggccattgtgtgacctcggacaaatgcttttccctctctgcgtctcggtctccctctctgtaaaacgggtgggtctgggggagtcttgcgggagtgaggttgcggcagtgacgttgcggcagttagcgctcccagccgtggctgacagctgcgaggtccctgtaggagcctggacagcttcagcgggaagccacggggctcggggccacccgctggcacggcgctgcccatcgagggcgttatcctgagcctgcaggacctcatcatctacttcgagcctccctccgaggacttgcagcacgaggagaagcagagcaagctgcgaagcctgcgcaaccgccagagcctcttccaggaggaggtgaggacgtggcgagggcggagcggggcctgtgggcccagggggcgggaccactgaggggcggggccacggcgctgggcggggcagggcctgagggacctggggaagtagggtctgagaagggggcggggcaggagaaggagccggacaggaaccccagccagtgagaacacgatggggcggggccttgggaggggcgggcctgctgtgctggtgggcaggacctttgggaaggggcagggcgtatggccgaccagggggcggggcctggagagaaggatggaataaaagagctgaggggcggggcctatgtgaagctcaggtatagggtgaggcctggggaggtgaggccaggagtggggccagaggtcagaggtagggctgccgactcagcgggcggggtctgctggcgcggggtctgtggggtgggcggacagaatcagtgtggggtatgggaggtgccgaggcagaaatagatctttgggcattagggaggggaggccagctgtgaacaaaacagaaaaaaatctctgtccttatggagttgacatggcggggagagacaggagatcaataaaataaataagtaaattgtatggcatattagatggtaataactgttaaagagaaaaattcagcaggtaaggggtagggagtgttggggttttgcagtttaagacagagctgtcagacagggtgacctggaggaagagaggaagccatgtgcaaaggccatgaggtgggcgggtgtttggcatgttccagaaacagtcaggtggtgattggagcagggaggcttgggtgggggagtgggaggaaatgagggcagagaggtgacgagggccaggccttggtgaggactttggctttgggagccacaggaggttttggtcctctacagtcacagctagttagtggcagagccggtcagtgtgatgccactttggttgtgctctccactttgaggcactgctcctctcactactgatctaggccccaggatgcagatacaacaattgttttgttttgtcttgttttttgaaacagagtctctctctgtcacccaggctggagtgcagtggtgtgatcttggctcactgcaacctccacctcccaggttcaaatgattctcctgcctcctcagcctcccaagtagctgaaactacaggtgtgagccaccacgcctggctaatttttgtatttttagtagagatggggtttcgccatgttggccaggctcgtctcaaactcctgacctcaggtgatccacccgcctccacctcccaaagagctgggattacaggcgtgagccactgcacccagacagttttgtcctttttgttgatttcactgtttataatgtctcccaagtgtagtgctgaagtgctgtctagctttcctaagtgcaagaaagctatgatgtgccttactgagaaaatatgtgttagataagcttaattaaggcatgagttatagtactgttggctgtgaatttaatgttaatgactcaacaatatatattaaataactgtctttaaacagaaacataaaaaacaaggttatgtaataagtggttgatgaaaatactgtcacagactctcagggactccctgtatttcccctagaagcagtggttcagtatttgataattcagtcttcataatcactttatagaacataactatgaataatgagaattgattgtatatgttttatgtacttttctgtatgtatattatgattcacaatgaaataagaaaaaatattaaaatgtaaaaaaaaaaagaaaagaaaagataaagtgagaaaaatctttctgatggttggtgtggagaatgaactgggcctctccagttggtgggagtggggttccagttggatggttggtgggagtggggttcctggaagtgagtaggatggagagaaaagtgcaggaaggggaagtataaactcagtcctggtgttaataaggactgaattatcatagactgaatctcatattggggatagagtcagagaggacaagaatagatatggggagccaaggaggagaggagagcaatgggactgattgggaatatgaaaccaaaggggctgatttagatctgggaacacaccgtcactagttgttgaaggaatatgaattcgtgaatccaagaaagacaaggaagggagggcctgggtctcctattgtgatgcctcttattttcctcatcctaggggatgctctccatggtcctgaattgcatagaccgcctaaatgtctacaccactgctgcccactttgctgagtttgcaggggaggaggcagccgagtcctggaaagagattgtgaatcttctctatgaactcctaggtaggggtcccagtcctgactcccctgagaacaccccagatccccagtcctattggatctgacacctcttcccccctcagcttctctaatccgtggcaatcgtagcaactgtgccctcttctccacaaacttggactggctggtcagcaagctggatcggctggaggcctcgtctggtaggagaacccgggggagtgggacagaggcttgtgggaggggatgggcatggccgcttcacctctcattctgggcaccctggcaggcatcctggaggtcctgtactgtgtcctcattgagagtccagaggttctgaacatcatccaggagaatcacatcaagtccatcatctccctcctggacaagcatgggaggaaccacaaggtcggcccctcacccctgacctctcatcccctgaactctgaatgctggcctctccccagggctccagaactctgctcactccctcacttccctcctccatctcatctctcacctgtacgccactcccactggctttcatctccacacaggggtctcaaacaatgactcttaagttgattctgggccacagatgtgcttggttagatctctgaaatgttttttttttttttttttttttgagacagagtctcacactgtcgctcagactggagtgtagtggcgctatcttggctcactgcaacctctgcctcctgggttcaagcgattctcctgcctcggcctcccaagtagctgggactacaggcacacaccaccacgcccagctaatttttgtattttttttttagtagagacagggtttcacaatgttggccaggatggtctcgatctcttggcttcatgatccgtccacctcagcctcccaaatgctggaattacaggcgtgaaccaccagcgcctggcatttttttttttttttttttgatacagagtctcgctctgtcacccagactggagtgggagtgcagtggcatgatctcagctcactgcaacctctgcttcccgggttcaagcaattctcctgcctcagcctcctgagtagctgggattacaggtgcccgccaccacgcccagctaatttttgtaattttagtagagacagggtttcaccatgttggccagtctggtctcgaactcctgacctcaggtgatccacccactttggcctcccaaagtgctgggattacaggtgtgagccaccgtgccccaccggtggcgctgaaatgtttttaaaattttcaaatattacagcctctaggtggactgtatatatatacacacactctgtagtttgccatagccctacaagttcctgttgcattatttctaaccacttcacacatttattcagtcggagcaaaagtaattgcagttttgctattaaaaggaatgacagccgggcatggtggctcacgcctgtaatcccagcactttgggaggccaaggcgggcggatcacgaggtcaggagatcgagaccatcctggctaatgcggtgaaaccctgtctctactaaaaatacaaaaaattagccaggcatggtggcaggcgcctgtagtcccagctactcgggaggctgaggcaggagaatgatgtgaacccgggaggcagagcttgcagtgagctgagattgcgccactgcactccagcctgggcgacagagccagactccatctccaaaaaaaaaaaaaaaaaaaaaaaaaggaataacaaaaaccagaattacttttgctccagcctaatacattttccacttggcccctaaagacacaagtttgcaacccctgctgatttaaaatttcatcttgattcctgtgtctctcactggtcgtttcagtctgccttctgacctcttacctcactactccagtatctccttccttacattgctgataccttatcccaactcatgtgaccctccctcagcctcttgccagatcttcctctttgacccctaacctttctctgatccctgaccttccactttcaccacctcctctcagtcaaaattgccacatcttatcccgatgcgctgtcctttcctcctggcttccctccctcccagggttcttctgtagatcctgccctggtgcctacacaccctttaacctctgaccttgacctctaggtcctggacgtgctatgctccctgtgtgtgtgtaatggtgtggctgtacgctccaaccaagatcttattactgagaacttgctgcctggccgtgagcttctgctgcagacaaacctcatcaactatgtcaccaggtctggctctcaacatctgaccccagaactcagaacctctcaaccctctccctgacttagagactccacacccagatggatgtcctttccttaatctcccaccccagggttaacaaccagtcctcacagatgtccactgtggccccactctcccttggcatccactcctcttgttctgtcttcctggctccatttctgcctctatctgtttctctttctttctccctctccctctctctctgttttctctttttatctttgcctgtttctgtcttgattcttcctccatgtctttctccctgtctctctcccatctctctctctctgtctttggatgtctgtctctctctggcttcccaccacttggctctcctctctgcctctccgtcatccccctctcctgtcccatctctcctgcagcatccgccccaacatctttgtgggccgagcggaaggcaccacgcagtacagcaaatggtactttgaggtgatggtggacgaggtgactccatttctgacagctcaggccacccacttgcgggtgggctgggccctcaccgagggctacaccccctaccctggggccggcgagggctggggcggcaacggggtcggcgatgacctctattcctacggctttgatggactgcatctctggacaggtacctgaccccttccaggggaccctcacccctgaccattgaccccagcatttctaagtctctgaccatacaccttggggttctcaggatcctgactccctgaaaaggtcaacttttgaccttttagtcctcatttcccaagaccctaaccccagagcttctagattcccggctctgacttgtatcctcgttacctacagaactctgatcccagagtaggtgtgacctctgaccctagatatcccagaagaccacgcagattactgtgatctctgatctttgacttctaaccccaggagaatttatttatttatttattttgtttgtttgtttgtttgtttgtttattttgaaatggagtctcactctgtctcctaggctggagtgcagtagcatgatctcagctcactgcaacctctgcctctcgggttcaagtaattctcctgcctcagcctcctgagtagctgggattacaggcatgcaccaccacgcccggctcatttttgtatttttagtagagacagggtttcaccacattggccaggctggtctcctgacctcaagtgatccatccgccttggccttccaaagtgctgggattacaggtgtgagccactgcatccggcccccaggaggatttaatctctggccccacagctcagaatcctaacttcaggggaaccctgacctctgcccttcatttcagagctacgggagcatccaagggagcactttccattagggtttccaggatgcaatctccacaggagcctccaatatctgtcccttttctcttgttatcattggttctgtgggacctgtgacgtctgacccatctctggtgactgatgcaggacacgtggcacgcccagtgacttccccagggcagcacctcctggcccctgaagacgtgatcagctgctgcctggacctcagcgtgccgtccatctccttccgcatcaacggctgccccgtgcagggtgtctttgagtccttcaacctggacgggctcttcttccctgttgtcagcttctcggctggtgtcaagtgagaacttgcccccaccccacggccagtcctcagacctaggactgacctgagacagcttccccagtcactccatggtcccccaggaggccaggacactgcagcctaccatcaagactgactggtgtccagaacccttacttgaagatcccagggacctccacgtgactccagactctttccaatgacctcagattctccctaaccccacgtccttccagtaacctctgagataatggtctcagactctcctagtggtctctcaacaacccaaggttcttccggtgacctcccaatgacctcagactttcccagtgactccagaatctgatgatctcatgactccagaccttccttgactccccagtggcctcagactctcccaatgactccagaatctgataatgatctaatgactccagaccctccttaaccccctaatgacttcagactcttccaatgacaccatactctctcaataatctcttaataatgccagcatctcccgatgacctttcaatagacccagacttgcccagtgaccctgctcccgaataaccccatttattccaaagaccccccaatgatccagtcctttcccaatcaccccaagctctccgaatgtccattcagtggtgtttatgtttatttcataattgtaacagatgctcagtgacttctcaaatgaccttcttattggtctccccaaccttccaatgaccccgaatgctctgttgacctggggtctcctctgaaggactgttccatgaccttgcagtcatctgaactcttctagattaaccagagaccctcccgctctcaactccctggctcttaattcccttatgatattcctttgactctagactttcttttatgacttctaaatgacctccaggacactatgactgcccggtgacctttggtctccccagaactttccattgatcccaggactgcttccatgtcccccactgaccacagactgtcccccataacctcccctcaatgatccccattgtccttccttacccagggtgcggttcctccttggtggccgccatggtgaattcaagttcctgcccccacctggctatgctccatgccatgaggctgtgctccctcgagagcgactccatcttgaacccatcaaggagtatcgacgggaggggccccgggggcctcacctggtgggccccagtcgctgcctctcacacaccgacttcgtgccctgccctgtggacactgtccaggtactgcctgccctgcaaaggttttctggcgaggcagggtctcttaggagtcagagagggggcagggtgccatcgttcatgcctgtaatcccagcactttggatggccaggcgtggtggctcacgcctgtaagcccagcaatttgggaggccgaggcgggtggatcacctgaggtcaggagttcaagaccagcctggccaacacggtgaaagtgaaaccctgtctctactaaaaatacaaaaagttagctgggtgtggtggcgggcgcctataatcccagctactcgggagactgaggcaggagaatcgcttgaacccgggaggtggaggttgcagtgagctgaggtcacgccattgtactccagcctaagcaacaagagtgaaactccatgtcaaaacaaaacaaaacaaaaaacaaaaattagcatggtggcaggtgcctgtaatcccagctactcgggaggctgaggcagaattgcttgaacctgggaggcagaggttgcaatgagccaagatcgtgccactacactccagcctgggcaacagagtgagacttcatctcaaaacaaacaaacaaacaaaaacaaccaacattttgggaagccgaagtgggggcctcgcgcttgagcccgaaagttcgagattagtatgggtaacatagtgataccccgtctttatagaaaaaaatttttaatatttacaaatttagacaattttttaaaaggagtgagagaggtggggagctgccctagaagctgggaacctcgttgtttaacagatggagaaactgagcacagagaggcaaaggattctgtcagagcagaatcgcagtctcagggagtcctcaccactgccccacaaagaaagggtggctcacacctgcgatcctagaactctgagaggccgaggcaggattgcttgagtccacgagtttgagaccagcctaggcaacatagcaagaccccatctctactaaaaattaaaagttagctgaggtgatggtccacgactgtagtcccagctacttgggaggctgagatgggagggtcacttgagcccagggattcgaggctgcagtgagctatgattgtgccactgcactccagcctgggtgacagagcaaaaccctgaaaaaaaaaaaaaaaaaaagaaagggagagagagagagaaagaaagaaaaaggctgggtgtggtggctcatgcctgtaatctcagcactttgggaggctgaggcgggcagatcacctaaagtcaggaattcaagaccagcctggccaacatggtgaaaccccatctctactgaaaatacaaaaatgagccaggcatggtggcaggcacctgtaatcccagctactcaggaggctgaggcaggagaatcacttgaacccgggaggtggaggttgcagtgagccgagatcgcaccactgcactccagcctgggcgacagagcaagactccatctcaaaagaagaaagaaagaaaggactgtttttgccttccctccaagcatgtccctataggagggaatataggttaggtttaaaagcctgacagcaaaggtttggttttcagtcacgtgatcttgggcatgtgacctcccctccctgagcctcagtttgttcctccgtgaggaaaaggggataacaccctgatatctgatagcattgttcattgttgtgaaggtaagatgaatggatataggcaagatgcttagtccagtcctgattaaacagtaagcactcaagacagtcactcattattagtagcagtgatatcatctgcgggggtgacttcatccccctgtccccagaccagtgccctgggcctcaccctggatgcctctgtccccatcccccagcctgtcagcctcgtgggctgtccactcggcctcccagacatccccccgaccccgctttcctcatccccatgtcccgcccaagtccaaaccatcattgcctcttgcctgcggaacgccaacaccgctactgtctactaggctcttaccctctgccaggcatcgatattaactatgtaacatttagtaatttacattaatgatctcactgagtccttattaggtatcgctatgatcctcatacggagaaggaaggagactcctccattcttttcattcagcaaacatttcctgagcctctcttctgggtctgagtctggttctgggctggatagggctggggacttggtggagaccagggcagccccaggccctgccctcatggagctcccagtccacgggggagacagacccgtcccagataattccttaatactctctcttcttttttttttttttttttttttggagacagagtcttgctctgttgcccaggctgaagtgcagtggcacaatcttggctcactgcaacctctgcctccagagttcaagcaattctcctgccttagcctcccaagtaactgggactacaggtgcgcaccaccacatctggctaattttttgtatttttagaagagaaggtgtttcaccgtgttgcctaggctggtcttgaactcctgacctcaggcgatctgccccccccccccccacttagcctcccaaagtgctgggattacagatgtgagccactacggctggccctggataattccttaattctgagaatgctaagccctcacccatctgagtgtcaaccctggagtcaaggcgagggatggggagcagggctgctggatggtgggaaagggggtgctggaggagcctcccagggctcacaggtgttcttggaaagaggggtcatgatggaggagggtagagggaccttggggtctcaagaacgtccctctgcctctagattgtcctgccgccccatctggagcgcattcgggagaagctggcggagaacatccacgagctctgggcgctaacccgcatcgagcagggctggacctacggcccggtgaggggctgcctgcagcctgcgggaggccggctagacttgcggtgccaggagggagagcggctcaccggcggagaggagggagggaccacagggcaccagggggtccttggactgagggtggcagaactagggttggaggtcaggggtcatagtctgggcatgtggggagtgggaaggaaaggggagcacatggagttgaccctgggttttctccaggttcgggatgacaacaagaggctgcacccgtgtcttgtggacttccacagccttccagagcctgagaggaactacaacctgcagatgtctggggagacgctcaagtgagggcccaggggagccgggggttggggctggctgctggtgcggtgggggagggaggcatggagagacagggcaggaggtagagactgagagagagaaggatggaggggacagggattgtgagacataaacaaatggggagtggccgggcacggtggctcacacctgtaatcctagcactttgggaggccgagacgggtggatcacttgaggtcagcagttcgagaccagtctggccaacatggcaaaaccccgtctctactaaaaatacaaaacttagccgggcgtggtggtgcacctctgtaatcccagctcctcaggaggctgaggcaggagaatcatttgaacctgggaggcagaggttgcagcgagccgagatcacactactgcactccagcctgggcgacagagcgagacaccgtttcagaaaaaaaaaaaaaaaaaaaaaaaaaaaaaaagaagcaaacggggagcaagaaagggacagaggcagaaagagagagaaagaaaaggtggggatggaaagagagagagatgcagaaagagacagggagacaggagaaagtggcagacaggaaaagacagacatagttagttatacagacaaggcgcagggaaagacagaagtcatgaagcctgaggccaggatcaagagagacagggccagagcgccccaggcactgaagcagcagaggtagagggagctggagaccctgaggccgtgggaggagacggggcagggagctctgaggggcgtgacctgtcgcctccactcccccacccccaggactctgctggctctgggctgccacgtgggcatggcggatgagaaggcggaggacaacctgaagaagacaaaactccccaagacgtgagtgtgggcagccaggtcccgtctggggatggactgggggctggggatgctgtgctaagggctggggaggtcgaggggtcttgtggggaggctgaggttagggaggaaggagacttgggttagggtgaaggtcatagggtcagggctctggggtcagaggtgaatgtccaggattgaggagttaggagtttcagagagagagagagggagggtatgagtccaggatccaggctcagggtctgcctagagtcagggaaaatgagagcagaggtcacatgtccacgtaaggggtaaggggccaatggtaagaggtgagaatctggaggtcgttggagtcgtctaagtaagggatcctgaaattataggtgagcagttacacgtcctgagttcagaggtcaaggactccagacccaggagtttggggtggatgaggactgggatcagagtaagaaacctcagagtgggctgggtgaggtggctcacacctgtaatcccagcactttgggaggttgaggcaggaagatcacttgagcccagttcaagaccagcctgggcaacatggtgagacccctctacaaaaaatttaaaaattagcaggacatggtggtgggacatgcctgtagttccagcaacttgggaggttgagatgggagaattgcttgaacccaggagtttgaggctgcagtgagccatgattgcaccaccgcactccagcctgggtgacagaacgagaaaacaacctcaaaaaaacaaaaagagccgggctcagtcgctcacgcctgtaatccgagcactttgggaggccgaggcgggcggatcacctgaggtcgggaattcgagaccagcctgaccaacacggtgaaacccaccctctaccaaaaatacaaaattagccgggtgtggtggcacatgcctgtaatccctgctactccggaggctgaggcaggagaatcacttgaacccaggaggtggaggttgcagtgagccgagatcgtgccattgcactccagcctgggcaacaagagtgaaactccgtatcaaaaaaaaaacaaagagagagaaaaacctcaaagttagtggtgagaggtctgagagagttccggggttagagataggggtcccaaagtcaagacaaagggggctagaggtcattgatgtcaaagcccttgctagggtcccaggatcctagggtcagaagccagggatctcaaaacttattctaaaatttcatagaactgcaacattatatcaaaggtcagaaacgccgaagctgggacaagggtcagcagtcagggatcccatatagtgcagagcccggaagtggaggtgagggccttgtcccatggagccctaccatgcccgcaggtatatgatgagcaatgggtacaagccggctccgctggacctgagccacgtgcggctgacgccggcgcagacgacactggtggaccgtctggcagaaaatgggcacaacgtgtgggcccgagaccgcgtgggccagggctggagctacagcgcagtgcaggacatcccagcgcgccgaaaccctcggctggtgccctaccgcctgctggatgaagccaccaagcgcagcaaccgggacagcctctgccaggccgtgcgcaccctcctgggctacggctacaacatcgagcctcctgaccaggagcccagtgagtgctcacccctggccctggccctgactcctaccccaactctgaccccagccccgatccctgatctctgacctgactcagcccccaaatgggctatatctttttttttttttttttttttgagacggagtctcgctgtccccaggctggagtgcaatggcgcgatctctgctcactgcaagctccacctcctgggttcacaccattctcctgcctcagccttccgagtagctgggattaccggcgggtgccaccacgcctggctaattttttgtatttttagtagagacaggatttcaccgttttagccaggatggtctcgatctcctgacctcgtgatccgcctgcctcggactcccaaagtgctgggattacaggcgtgagccactgcacctggcccaaatgggctatatctatcacatcgagcagactgaccaggaggtcagaaaggactgacccctccccgaaactctgagccttaccccagttccaactcggaacctgatggaaccacttccctttacctgacgccagccctgcctgggctatgactgcaaaccagagccgtcagcctaggaacccaatgagtgccaaccccacctttgactctgattcctgacctctagctttgatccctaatcactaatctctgaactgtagctaccacatgaaggcacccaaccaagggcttagagagcctggtcacccctacccctaacctgactcctgacctatcactggcttccaatcccagccttgaccccaaaccctggccatggtccccaaccttcagtttctcaactcttggccccaacctgaatttccatcccttccataatcctggctctgaccctccaatcctggtctcagcccttcattctaatcaaccctgatcttgacccttaaccccagaccataactctgaccagttcactgagctggctttttccttctgtgtctctgccagtatccctgttttctgagaattctgactgctacagagatgggggtctctctcaacaggtccctgcctctctctgacttttctgaggttccccaattctcctctaactccaagaaattgaccctcttccaacagttccccaaagcccttactgtcccccaaagcctgtcttctaccaacttctcgatgtcttgggatccacatcttccctagcctctctgactctgcctggcctcatttataggtcaggtggagaaccagtctcgttgtgaccgggtgcgcatcttccgggcagagaaatcctatacagtgcagagcggccgctggtacttcgagtttgaagcagtcaccacaggcgagatgcgcgtgggctgggcgaggcccgagctgaggcctgatgtagagctgggagctgacgagctggcctatgtcttcaatgggcaccgcgtgggtacctccctgggcaccattctgccaggtcctgtggtctctcccacagcttgtctactctggccctgcctctgtctgtgcctcactctgtccccacttcatgcatctactgtaccactcatccacccatctatccatccattcaaccaatgattcatccatccatccatccatcgatctatcagacatccatctatccaaccaacaattcatccatccatccatccatccatcatccatccatccatccatccatccatccatccatccatccatccaaccatccatccagctaaccaaccatccattcatccagccaacatagggagaccccatctctacaaaaaataaaaaaattagctaggcaaggtagcatgcacatatagtcccatcatccatccatccatccatccatccatccatcatctatccatctgaccagccaaccatgcatccatccatgcattcaaccatccatccatcatccattcatccctcatccatccaaccaaccatccatccatccattcttccagccaactgtccatccatccatccaataaccatctgcccatccaacaaccatttatacaaccatccttcccttcttccctctatctgtcatccatttatttatgcttgcccctacttacactttgttctttctctgtatcaacccaggtaaactctcaactttccaatcattcttctgtccagccatgtacccaatttctcatccatctatctgtctcattagccactcatctattttgtgcatgtatataagcatatatggatctgtatggggacactgataggttcatttttcctttccatccctctacttactgctgcttccagccccccactaccactttggtggtctgcataatgctagccatggcaacagcagagaacccaggcagaagggatgagacacagagattagtggggagaaaaattcctgtgatcatggatgcaaatgtgaggaaagatggagacactgtggggtgacccctcttccataccacctgccctgaacctgacacttcgaatgtctgtcttcatatatctctccctccctgcttccttatctctccatttctctgtgtgtctccccacaccatgtcttctctggctgtcctcacagggccagcgctggcacttgggcagtgaaccatttgggcgcccctggcagccgggcgatgtcgttggctgtatgatcgacctcacagagaacaccattatcttcaccctcaatggcgaggtcctcatgtctgactcaggctccgaaacagccttccgggagattgagattggggacggtgagggctgagaccccttcacatgccctttcttgttttcctctgtctctcccaaccctgcactgcccttctgcctccaactctcccatccctacctcctcccctcggctccctctgccctgcccacctgccctcacccctgcccatccatcccctcccaccaggcttcctgcccgtctgcagcttgggacctggccaggtgggtcatctgaacctgggccaggacgtgagctctctgaggttctttgccatctgtggcctccaggaaggcttcgagccatttgccatcaacatgcagcgcccagtcaccacctggttcagcaaaggcctgccccagtttgagccagtgccccttgaacaccctcactatgaggtaaggactgagcccctcaatgccttctcatctgcctccaaagctccttccttccacagtgctcttctttgagtttctcttttccctccatgttaggacacaaaccacatggaagcaagtgtcagagtgatgggctcacgggctgtatgactccgggtgtaactttggcaaaccacagcttcctgaggtccaggtgcctcacctataaaataagggaaaccctgcctgggcaacaagcaaaactccatctctaaaaataaaaaaaaattaagtctaggcatggtagctcatgcctgttatcccagcacttagggaggctgaggcaggaggatcccttgagcccaggagttcaagaccagccttggcaacatagggagaccccgtctctacaaaaaataaaaaaaaaaattagcaaggtgtgtagtatgcacatatagccctagctactcaggaggttgagactggaggattgcttgattccaagaggtcaagactgcagtgaattagccagatgtggtggcacatgcctgtaattccagctacttagggggctgaggcaggagactcgcttgaacacgggagatggaggttgcagtgagccaagattgcgcccttgcactccagcctgggcaaggagagcgaaactccatctcaaaaaaaaaaaaaagttaaaggctgcagtgagctgtgttcacaccactgcactctagcctaagagacagagcaagaccctatctcaaaaaaaaatttttttttaataaataatttttaaaacttagctgggtgctgtggcacatgcctggtgtcccagccactcggcaaactgaggcaggaggatcctctgagctcaggaggtcgaggctgcagtaagctgattacacgactgcactccagcctgagtgacagagaggaccctgtctcattgaaaaaaaaaaaaaaaaaagagctgggcatggtggctcatgcctgtaatcccagcactttgggaggccaaggcgggcagatcacttgagcccagaagttcaagatgagcctggccaatatggcaaaaacccatctctactaaaaatactcccccaaaattaatggcgtggtggcgggtgcctgtagtcccagctactcaagaggctgaggcaggagaatcacttgaacccaggaggtggaggttgcagtaagctgaggttgcaccactgcactccagcctgggtgacagagcaagaccctatctttacaaacaaaacaaaacaaaacagaaggactctgcaaaaggagttttaagtatgggaacgtccagttgaggtctgagttttggaaaggtccctattggcagtggattgtaggaggtgacagtggagtcagaaggatcctagaggtggctgggacggggcagtactgcagagtggacgcagagttcctgacacctgccactaccagatgtccccaacccaaggcacagcatgctacacggaagtgagaatgaatacctggaaatacacacagccatgtggacgaatctcagacataatgtcgagtagaagaagccggagacaagagagcacaggctgtgggattccattcacagaaagttcaagaacaggcagagcggatctgtggtgtgctcagttgggaaattggttactatgaaagaataactcagagacattgttagttactttgaatgcaaatcacaggagggagctcagtcagtagactattgccaaagaacaaaggctggttggatgcggtggctcacgcctgtaatctcagcactgtgggaagccaaggtgggaggatcacttgagcctaggaattcaagaccagcctgggcaacatagcaaaaccctgtctctacacagaataaacaaaattatctgggcatggtggtatgtgcctgtggtcccagccacttgggaggctgaagtgggaggattgtttgagcccaggatttcggggctgcagtgagccgtggttgcaccacagcactccagcccaggtgacagagcaagacctgtctctaagaaaaaaagagtgaatgcagaaaccagatttataagacagaggggagaaagaggagagaaaaaagacccctaaagagtctgagaacaggctgggctcggtggctcatgcctgtaatcccagcagtttgggaggccgatgtgggtggctcacctgaggtcaggagttcgagaccagcctggccaacatagtgaaaccccgtctcttctaaaaatacaaaaaattagccaggcatggtgccgggcgcctgtaatcccagttactcgggaggctgaggcaggagaattgcttgaacccaggaggcaaaagttgcagtcagccaagattgcaccattgcactccagcctgggtgacagcgagactctgtctcaaaaaaaaaaaaaaaaaaaaagattctgagaacaaagaatcttgtatgcacagttttagggcaaattcattggctggcaaggagtacctaggttcatcttggcaactggtccttggagaggtcaacgtgaggaggggcatgaaagagaacaactttcattgtttaccgagtctctaggagacttttgagagtccattgtttttggtttttgttttttgagactgggtctcactctgtcacccaggctggagtccagtggcaagatctcagctccccacaacctctgcctcccgagttcaagcgattcttttgcctcagtctccttagtagctggaattacaggcatgtgccaccacgcctggctaatttttttgtatttttagtacagatgaggtttcaccatgctggccaggctggtctcaaactcctgacctcaggtgatcagcccgcctcagcctcccaaagtgctgggattacaggcatgagccactgcgccctgtcgctatttgtggaattgtaactgaacacaggttcagttgctcatcagttacagagtccaattaacaagagcgaggtctggtagaaagaaaatgactttattcatcaaaactagtcatggagaagtgaccggattcccatccgaagcaaccacttcaaatctaggggggaaagcaagggtttaaaaaggggaaacttggctgggggtggtggctcacgcctgtaatcctagcactttgggagactgaggcaggcggatcacatgaactcaggagattgagaccagcctgggcaacatggtgaaaccccgtctctaccaaaaatacaaaaattagccaggcgtgttggctcatgcttgaatccaggaggcagaggttgcagtgagccaagatcacaccattgcactccagcctgggtgacagagcaagactcttgtctaaaaaaaaaaaaaaaaaaaaaagaagtctgagaacaaagaatcttgtacgcacagtttttggggcaaattttcaggagactgagacacaagaatcatttgaaccctgtaggcagaggttgcggtgagccgagatcctgctattgcactccagcctgggccacagagcaagactgtgtctcaaaaaaaaaaaaaaaagcattgaagttgagctgcctggttactggttacagaatgacagagtagattgttagatggatgtagggaggttttggaagttaccccaagtgattccagtgtgtgtccggggctgctagtgtacacgacgcccagagaaatgttgcagagggctgcaagcaccccagggcccagcggtgtacccggccgggagcttcatccccctgcaggagtggggggcccttgactaattcccatgcaggtgcactatggcctaatggtggctccgtgtgtgaccaggtgtaggaccaacggcctggcctagcccgcctgcccagcccagtactccattccctgccacctcaggtatcccgagtggacggcactgtggacacgcccccctgcctgcgcctgacccaccgcacctggggctcccagaacagcctggtggagatgcttttcctgcggctgagcctcccagtccagttccaccagcacttccgctgcactgcaggggccaccccgctggcacctcctggcctgcagccccccgccgaggacgaggcccgggcggcggaacccgaccctgactacgaaaacctgcgccgctcagctgggggctggagcgaggcagagaacggcaaagaagggactgcgaaggagggcgcccccgggggcaccccgcaggcggggggagaggcgcagcccgccagggcggagaatgagaaggatgccaccaccgagaagaacaagaagagagggtgagtcgaggggggcccagagtggggattgggggctgccttgggacccccaagtaggcaaccacagtaacctgagaaacccccattgtaccccaaagtagacccatatatgctaagtggagtaagaataccgagagattctatcatgtctccaatgaaccccattattttcctgggatgccctaatgtccccaagaatatataattgggtaccctagtatctatatggagaactctattatccttgagtacctggagggccccaaagggcttcgcccaatggaccttatcatccgtggacactaaaagggacttcagtatcttcctaggagagtttactgcacagtaaggtatcccagtgaatacccagtggtcttctaaatggggatcctttctgtgtcacaaatgtaccccccgaaatctaacttaaagggagattctgagaaggtactaaatctgctttttccctacaatggcagtggtttcctttttttctttctatctttttttttttgaggaggaatctctgtcgccaggctggaatgcaatggcgcaatctcagctcactgcaacctccacctcccgggttcaagcgattcttctgcctcagcctcctgagtagctgggattacaggcacgcgccaccatgcccagctaatttttgtatttttagtagagacggggttttgccatgttggccaggctggtctcaaactcctgacctcaggtgatccacccacctcagcctcccaaagtgctgggattatagacatgagctaccacgcccggctccttttttttttttttttttttttttttttgagatggagtcttgctctgttgcccagtctggagtgcaatggcacgatcttggctctctgcaatctccgcctcctgggttcaagcaattctcctgcctcagcctcttgagtatctgggactacaggtgtgtgccaccacacccggctaatttttgtatttttggtagagacagggtttcaccatgttggccaggctggtcttgaactcctgacctcaggtgatccgtacgatggcagaggttttcaatgggattgaaaacccattgtgtctcttggtggatgtttggaaatgatggagtctttgtggtcattacagtttgggaggggctgctgctgctgggcgggggccccagggttccgcctgccttgcagtgtacaaaacagtgccgcacaatgaagaattgtccttttccaagtgcatttagcacctatacgagaaatgcatgtgggaaatgctgacttagggggacccccatataacccagtggggacctccatattcccagaaggcgcctttaatttgggtaactcagcatccacaagcgcagagcatagcacttctagaatggattagtctggggtaggtgggaatccagccctctagaggcaagacctggggtattagaagcagggtgtatccaagctggatgtgggggcatgaatattgcggtgggagggctgggcttgaaagctggctctcatggcgcctctcctcccactaccagcttcttattcaaggccaagaaggtcgccatgatgacccagccaccggccacccccacgctgccccgactccctcacgacgtggtgcctgcagacaaccgcgatgaccccgagatcatcctcaacaccaccacggtgtggaccagtaaccctcaattttggggtccccccgcatagcataggcactcctgaatttccaagtttagtgtgacagtccccagtagctgcccaccttacactggggactccccaatatacactagaaactcataaaatatggcacacacagatttaatcctttgaacccctaaatccatatagctatggcccacaaacggcagggagtacagtagaggtgtacagcacactgatataactcctggggatccccaaagccatgatataagccaatatagactagggaccccaacatttgggctcactcatataaacacaataccctcaatgtaatacctactctaatatattactgggaacaaaaattcataattgtcttaatatagttttgggatttccccaaatccaaaatatttcatagacagacagcctagtgcagtgctccccaactattttggcaccagggatcaattttgtggaagacagtttttccgtggaccacggatgcggggaaggatggtttcaggatgaaatgttccatctcggatcatcaggcatagattccttttttttttctttttatttttgagatggagtcttgctctgttgcccagtctggagtgcagtggtgtgatcttggctcactgaaacctctgcctcctgggttcaaacgattctcctgcctcagcctcctgagcagctgggataacaggctcctgccaccatgcccagctaatttttgttttctgttttttgtttttttgagatggagtctcagcctgtcgcccaggctggagtgcagtggcgcgatctcggctcactgcaacctctgcctcccgggttcaagtgattcttctgcctcagcctcccaagtagctgggactatgggcacacgccaccatgcccggctaatttttgtgtttttagtagaaacggggtttcaccatattggccaggctggtctcaaactcctgacctcgtggtctacccgcctcggtctcgcaaagtgctgggattacaggcatgagccaccgtgcctggcctaatttttgtatttttggtagaaacggggtttcaccatgttggccaggttggtctcaaatccccgacctcaaatgatcctactgcctcagactcccaaagtactgggattacaggtgtgagccaccgcgttcggctgtagattcttacaaggagtactcaccctaggtggcttggatcccagtaccagcccacagcctggggttggggatccctggcctcgagattagatcatgggccgactgggtgccacttgggcaaaagtcatttcaccactctatgccttctctcctatggaggtgctatggttttccatcagtagaatgggggtaaaaattatacctacctgatatggaggatgaagtgagttaatctgtgtagaccttagaacaggcctggcatgatggctcacacccgtagtcccagaacgttgggaggccaaggtgagaggatcacttcaatccaggaatttgaggctgcaggctacgatggtgcctctgcactccagcctggatgacagagggagactgcaactcaaaaaaaataaaaataaaaaaataaggaaagaaaaaaaagaagaagaagaaggaaagaaaaaaaagaccttagcacagtcagtgctatttgtgagcaattatttaattattttttgtatttttttattttgagatggagtctcactctgtcacccaggctggagtgcagtggcacgatctcggctcactgcaacctctgcctcccaggttcaagcgattctcctgcctcagcctcccgagtacctgggactacaggcgcccaccaccatgcccggctaatttttgtacttttagtagagacagagtttcaccatattggtcaggctggtctcaaactcctgacctcaggtgatccaccttcctcagcttcccaaagtgctgggattacaggcgtgagccaccatgcctggcctgcaattatttatttgtcagtctactgtaacctgggaggaacccaaatatggcactgtcacacaatattcccaagggactcctaaatctagaattgcacaaattgacacagaaacagacataaccagggggtgggggactcagatccaacaacttcctgttaaactcccagaggacccaacagtccagggaaaccaatttcgagtcccagggagcccgagtccctgacttccagactgaccactagttcccctccttgtgtcaccagtactattactccgtgagggtctttgctggacaggagcccagctgcgtgtgggcgggctgggtcacccctgactaccatcagcacgacatgagcttcgacctcagcaaggtccgggtcgtgacggtgaccatgggggatgaacaaggcaacgtccacagcaggtgccggggctggggggaggtgggaggtgcagggtggggagggcaggaggcagtcagagctcccgacaccagctctgtggctgcctggttgtgggacctaggaactttctggagcgggaggattctctggggcactgggcacccagctcggaagcttccctcctcctctttttcctcctctcttcctgccctggtatttttcttctcctcctcctcctctttatgcatttctcctattccattttctccttttccttctcatcctgtttcatctcacccttctccttctctgtcatctcattctctctcctcctgcttcccttgctttccctcctttcagacccccacccccatcctgactccccactgcgccagctgctaggaatcccagctccgaagagctcagtgtccggggcgaggggtttcagctctcaggtctgcaggcggtgggtgtttggggatgggactctgaggttgtgtgtttccgggagcttggggaagggggtgtccagggtccagagctactcacatgaggagtgcagtgaccgcttctgtctcctgcagcctcaagtgtagcaactgctacatggtgtggggcggagactttgtgagtcccgggcagcagggccggatcagccacacggaccttgtcattgggtgcctggtggacttggccactggcttaatgacctttacagccaatggcaaagagagcaacacctttttccaggtgagtccaggccacagcaatttagcgagagcatcatgtcccagcatcccaggacagctcttatagatgtcccctgaggccagacctcagagatggaacaaaaacagctcctaggctgtcctcaagaggtcgctgggagaccaccttgttgaaacttccatgaaactaaggcccagactggaggagatacagaatctcactctgttgcccagactggagtgcaatgggacgatcttggctcactgcaaccttcgcctcctgggttagagggattctcctgcctcagcctcctgagtagctgggattacaggcgagcaccacaacagccggctaagttttatgtttttagtagagacgaggtttcactgtgttggccaggctggtctcaaattcctgacctcaagtggtccacccacctcggcctcccaaagtgctgggattacaggcgtgagccaccacacccagccagagtccagccttgaccttggaaagaggtttctgttccctcttgagctgggtgacaccagtcaccaacttctctccaaccagggaacacgctaggatgggccagaatcctaaggtggccttttccttttcaacattttattctgaaaaatttcaatcatacagcaaaattgaaggagctatgtagataacaccctgtacccaccacctggaatctactatcaatgttgtagatattggctttatcacatattcacctacctgtccattaatctaaggtgggtttgtacaactttattttaattttttggcatccattgttggttatgaaattttattgcattttattttctttattttgagacagggcctcactctgtcccccaggctggagtgcagtggtgtgatcacagctgactgcagcctcaacttcccaggctcaagcaatccttctgtctcagcttcctaagtagctgggactataggcatgcaccaccttgactagctgattttttgtgtgtattgtttgtagagatgggttttcctcatattgtccaggctggtctctcgcttctgggctcaagcgatctccccaccttggcctcccaaaatgctgggattacaggcttgagtcactgtgcctggcttattttttatttttattttttgagacagggtttcgctctgttacccaggctggagtgccatggtgagatcacagctcactgcagccacaaccttcctggactcaagcgatcctcccacttcagcctcttgaatagttgagaacacaggcacgtgccaccatgcccagctaattttttttgtatttattgtgcagacggggtctcactatgttgcccaggctggtctcaaactcctggtctcaagcaatccttctgcctcagcctcccaaagtgctgggattgcaggcgtgagccactgctcctggctaaagctttatgttaaatggagaattaaaaacgtatacaagaatggaatagtataatgaactgccatgcccctgtcacacagcttcaactgtcacccactcacagccaatcttgtttcatcttttttgtctgtttgttttttgagagagggtctccctctgtcacccaggctggagtgcagtggcgcaatctcgactcattgcaacctctgcctcccaggttcaagtgatcctcccacctcagcctcctgagtagctgggactacaggtatgcaccaccatgcctggctaattttttttagttttagtggagacaggatcttgctatgttgcccaggctggtctcaaactcttgggctcaagcaatcctcctgcctcagcctcccaaagtgatgggatgacaggtataagccactgcgcctggcttgtttcatctttttatatctacttcccttccacacccactggataattttgaaggaaattgcagacatcagatagtttcctctgttttcagtgtgtagctttaaaagataaggatgatcttaaagagcataaccacaataccactatcacctaaaagaaaaaaaaacaatagtttctaaatatcatcaaatatccagtttgtgttcagatttctctggttgtccccaaaatgtcattttaccatttctttgtttgaatcagaatctaagtagggtcatatattttattttatttattatttatttttattttattttttgagacaatgtctcactctgtcacccagtctggagtgcagtggcatggtcttggctcactgcaaccttcgcctcccgggctcaagcctcctaagtatgtgagattacaggtgtgcgccaccacacccagctaatttttgtatttttagtagagacggggtctggctatattgcccagcctggtcttgaactcctgggctcaagtgaccctcctgccttggcctcccaaagtgctgggattacagtgtgaggcagcatgctcaaccttatttatttaattatttattttaatttattaagacagagtcttgctctgtcacccaggctggtgcgcagtggtgccaaccgtactcaaccttatttatttatttattttaatttattaagacagggtctcattctgtcacccaggctggtgcacagtggtgcaatcttggcttactgcagcctcaacctcctgggatcaaacgatcctcccacctcagcctcccaagtggctgggaccacagacacgcactaccacacctggctaatttttgtattttttgtagagacggtgttttgccatgttgcccaggccagtcttgaactcctgacctcaaactattcgcccacctccacctcccatgtaatcccagaatataaaacgtgctgggattacaggtgtgcaccaccacgctcgaccagggtcatatattttaggtggttgctctgtaccttgagtttcatttcatatgtagatttccccctccattccttcttctttcccaaccccccagaaatgtatttgttgaaggaaccaggctatttgtcctgtggcactttgctcctcaaagtgtggtccctggaccaaccagcaggagagctgcaggatctttagctgggtctagtcatgggcacctgcagttccagctaccctggaggctgaggcaggaggatcacctgagtctgggaggcagaggttgtagtgagctatgatagcgccactgcactccagcctgggtggcagagcgagacactgcttctttttaaaaaagttaaaatgggccgggcgtggtggctcacacctgtaatcccagcactttgggaggccgagttgggcagatcacctaaggtcaggagttcgagaccagcctgaccaacatggtgaaaccccatctctactaaaaatacaaaaattagcctggcgtggtgacgggcgcctgtaatcccagctacttgggaggctgagacaggagaatcgcttgaacgtgggaggtggagtttgcagtgagccgagatgatgccactgcactctctagcctggatgacagagtgagacgtcatctcaaaaaaataaataaacaaaattaaataaacccagagtctcagaccccttcccatgcctgccaaatcagaatctgtattttgacaggatcccaggggcttcctgtgtatattaaatctggagagggctggcctggtttcccatagcctggatctggctggtgcattcctgtggtggctttttaacattttcctttgtcccccatatttcctgtaaactgggagttgggtcccagggtgcaattagatcaggtttggtgtgggcgggactgcttcagagacaatgttgtttgtggaggcagaggctggctggatgggctccactgggaagacgggagaggggcaagacagtctgaggacacttcctggaattttttgttttgagatagggtcttgttctgtcacccaggctgaagtgcggtggtgcaatcatggctcactgcagcctcgacctcccaggatcaagcgattctctcatcttagcctcctgagtagctgcaactacagatatggaccgccatgcctcgctaattttttatgttttgtagagatggggtctcactacgttgcccaggctgctcttgaactcttaggctcaggtgaccctcccacttcagcctcccaaagttctaggattacaggtgtgagccatcacactctctgggttttgaatgagtatgcttgggagagaaatgcgaagggcattcccagtgcggggtgtgatgtgtgcagagacagatgacaggttgctctgggaaagttggaggaggttggcctggctggatcagaggtgggacagtctaagggtgacctctgagccattttggagcctctaacgcccagatgaggacctacaaattggccccagagtttgaggtccagagtcaaccctccctccagcccacccgtttgctcacctcgtcctcttctcctctgccaggtggaacccaacactaagctatttcctgccgtcttcgtcctgcccacccaccagaacgtcatccagtttgagctggggaagcagaaggtacaagtgcagtgatgggggcactaatggggccaggctgaggcaggagatgtggggaggccaggcgggcagagccactgaaggggagggggcaatccaagaggtctccctggaagtggtgtggtgggacagagggggctggccatcttgacccatgtgtgtctctctgccctcagaacatcatgccgttgtcagccgccatgttccaaagcgagcgcaagaacccggccccgcagtgcccaccgcggctggagatgcagatgctgatgccagtgtcctggagccgcatgcccaaccacttcctgcaggtggagacgaggcgtgccggcgagcggctgggctgggccgtgcagtgccaggagccgctgaccatgatggcgctgcacatccccgaggagaaccggtcagggccagcccagctatgcaggggtgggcaggtgttgcaagccctctggggtctgggtcccactcagtgcccctcctcaacacaaccccgggattccagactacaccccaggaatctccagacctacctcaggggactcgggctcagctcagacatccccagattatgtcccagggggattcagactcaacgcaggaggctctacaccatcccagtggaccgcaggcccaccctaagggaacccagacaataccccaaggacccagacccactccacagggccccaaacccatctcagggagccagacccacatcaacaccccagggggccccaagtacaccccaggatccctggacatgattcagggaggcttggatgcaccctagagtctcttgggcatatgcagggaggctttaagaagaatcccgtggatatttcaaacccaccccaggggacccagacacacctagggccacagatgcgttcacatggatggcagggttactcttaagaactctgaacgtggccaggcacagtgcctcacacctgtaatcccagcacgttgggaggctgaggcaggcaggtcacctgaggtcaggagtctctactaaaaatacaaaaattagccagttgtggtggtgtgcacccatcgtcccagctactcgggaggctgaggcatgagaattgcttaaacccaggaggcggaggttgcattgagctaggatcacgccactgcactccagcctgggcaacagagcaagatgccatctcaaaaaatagaattctgaacgtgggaggaatcccagactcacccaggaggcttctgacatgcctctttctttctttccttccttccttcctccctccttccctctctccttcccttccttccttccttcccctctccctccctccctcccttccttccttcctctctccctccctcacttccttcctttattcattcatccattcaacaaatagctttgggtccctcctatgtgctaggtagtattccaggctggagacaccaagcccctgtgaagtgacattctagtaatgcttgtacataactcaggatgctcggacatgcccaaagggacccagggtcatccccagggccccagacacacccgtttattaatttattcattcaacaaatatttatgggtacagtggctcatgtttgtaatctaagcacttcaggaggctgaggaggagggagggttgcttgaggccaggggtttgaaaccaccaggaagcacagtgagaacccgtctccacattttttttttctttttaattagcttggcttggtggcacacacatgtagtctcagctacttgggaggctgaggcaggaggattgcttaagcccaggagttcaaggctgcagagctaggatcgcaccactgcactctagcctgggcaacagagcaagaccccatcactaaacaacaacaacaacaaatgctaagcactttactatgtgctaggtgtggttttaggtgctgggaatataacaaacaaaagcagaaacaaaacaggcagaaatgtcctgcccttggaatttacattctaatggcactcaaacacaactagtatactcagacctgccagagggggacccagtctgggggcccaaacacatcttggaaacatcagatgttctacatggactctcagactcttacgaagtcccagaccatcccagggaccccagaggtatcccaggggcccccagatcccttagggacttccagaaccattgaaagactcctagacccagctccactgccctcacagaaccctaagctaggaggccactggaactccctgctgcagccttcgacactcgtctaagcatctctgcctttctggggtctgtgcctctgtctcccatcttctcccaggatgggtgaattgatagatggaatggtaggggtttgaaggaaagacgaatgaataaatgggtggatagtgatgaaggaaatggaggaagagatggtggcttgactgatgcaggaggctcattcatctgtccctgtctgtttcccacctctgctgcaggtgcatggacatcctggagctgtcggagcgcctggacctgcagcgcttccactcgcacaccctgcgcctctaccgcgctgtgtgcgccctgggcaacaatcgcgtggcgcacgctctgtgcagccacgtagaccaagctcagctgctgcacgccctggaggacgcgcacctgccaggcccactgcgcgcaggctactatgacctcctcatcagcatccacctcgaaagtgcctgccgcagccgccgctccatgctctctgaatacatcgtgcccctcacgcctgagacccgcgccatcacgctcttccctcctggaaggagcacagaaaatggtcacccccggcatggcctgccgggagttggagtcaccacttcgctgaggcccccgcatcatttctcgcccccctgtttcgtggccgctctgccagctgctggggcagcagaggccccggcccgcctcagccctgccatcccgctggaggccctgcgggacaaggcactgaggatgctgggggaggcggtgcgcgacggtgggcagcacgctcgcgaccccgtcgggggctccgtggagttccagtttgtgcctgtgctcaagctcgtgtccaccctgctggtaatggcttcctcctgctttcctctgtcccattcttctcccacattcccaaaactccagagatacatgcatcaatcctcctctatttatgcatccaaccacccattcattccctcctctatacatccatccacctttctttttattattattattttttcgagacggagtctcactgtcgcccaggctggagtgcagtggcgcaatctcagctcactgcaacctccgcctcccaggttcaagcaattctcctgcctcagccccccgagtagcggggactacaggcatgtgccaccacgccccgctaatatttgtattttcagtagagactgctttcaccatgttggccaggctggtctcaaactcctgacctcctgatctgcccaccttggcctcccaaagtgctgggattacaggcgtgagccaccgcgtccggcctccatccacctttctatgtatcctcccaccatctccctatctttcattcacctttccctccatctgctcacctgtcatctctttatgtttattcatctcttctttcttcctattcatctatccaaccaaccatcattcatccatccatcaatccatcagtcctccaccagcctttccatccacccattcatcctatccattcatgtgtatagatcatctttccatcaacaagatctttccatcaacatctttccatctgcctttctatccttttgttctccacccactccattcattcattcatgtacccatctatccaagtttcaatctatttgcccatccatcttttcattcattcatacagcagtccatctaccattccatctgttcatctatccacctacccatttatgtattaatctatctttccttccgtaggtccaataatcatctcctcccacctatgcgtccatccatacctacatccacagatccatccgttcctccagttcccacctacccttcatccatccatccatctctccattcatatgtacgtacacccatccacctacccacaaatccatttagccatccacacccatccatctacccgttccctatccttctctccatcccttgtatcatgtacccttttattcgtagacccatctaactattcatttatatatccatctttttggttttgtttgtgtgtttgtttgttttgagacaaagtcttgctctgtcacccaggctgaagagtgcagtggagcaatctcaaatcactgcaacctccgcttcccatgttcaagagattcttctgcctcagcctcccaagtagatgggattacaggtgcccgccaccatgcccggctaatttttgtatttttaatagagatggggtttcaccatgttgaccaggctggtcttgaactcctgactttgtgatctgcccacctcgtcctcccaaagtgctggaactataggcgtgagccaccgtgtccaggcaagacagggtctcgctctgtcacccaggctggagtgcaatggcacaataatggctcactgtagcctcaacctcctgggcttcagcaatccttctgcctcagcctcctgaatagctgggactacaggtgtgcactaccatgcccaggtaagttttaaattttttgtagaggtggagtctcgctattttgcccaagctggtcttgaactcctgggctcaagcaattctcccaccttggcctcccagtgttaggattacaggcatgagacgctctgctcaacctaattttgtttttatttattatttttaatttaattttattttgtaagagacagggtaatgcccaggctagaatgcagtggtatgattgtagcccactgcagtcttaaactcctgggttcaagtggtcatcttgcctcagcctcccgaagtactgtgattacaggtgtgagccaccacacctggccccaacttttcatacacaaacctatccagccatgtggccaaccatccccccaccctcatggctattcactaatttatctatttatccacatattcatttacttcctcatgcatctatcaacccatccatcacctactcacctacctatacatcatttatccttctctcatccatccacccatcatctcttcctccatcatttccttcatctctccatcatcatccacttattcatctttccttcaaacctctaccattccgactcgggattcatccagccagccatccaatcctccctccattcatccatctctctctctcccctgcactcttcttccctttcgtctactccctctttacttccatatgttagcatcttttaaactttaatttattttgtttttgagacagactctccgtctgtcatgcaggctggagtgcagtggcataatatcagctccctgcaacctctgcctcccagattcaagtgattctcttgcctcagcctcctgagtagctgggaatacaggcgtgcaccaccacacccagctaatttttttttgtatttttgtagagacggggtttcaccatgttggccaggctggtctcgaactcctggcctcaagtgatctgcccgccttggtctcccaaagtgctgggattacaggtgtgagcctcgcctcatgtgttagcatcttcattatgttgactgagagctggtgtatgctgggagctatgcaggcgtagggtgtgtcctgggccagaggacacagcacatgcttaggcttgggagaaaggacactcgcctgtgatgggagaggcactcatatttgggtctgtggtctgggctgtgtgggtgggacacagggtgtggacctgggtggatcttaaggagggtggatggcaaggcgggggatgccattcctgctgtgggaggaatcggatcagccaatgcaggaatgattggcatgtgcatgaggggcaggtctggagaatgaggccagggcctgatgatggaggccttgcaggccacagtgaagaaccgagactttgtcctgtaggtgatgggcatctttggcgatgaggatgtgaaacagatcttgaagatgattgagcctgaggtcttcactgaggaagaagaggaggaggacgaggaggaagagggtgaagaggaagatgaggaggagaaggaggaggatgaggaggaaacagcacaggaaaaggaagatgaggaaaaagaggaagaggaggcagcagaaggggagaaagaagaaggcttggaggaagggctgctccagatgaagttgccagagtctgtgaagttacaggtgggctgctgcttcctgcttttcggcctctgtccatctgggctgggagacacagggtaggtgggatgtgagtctggacttcgtcctcaggcagtggggagctgtggaaatgcatatggcagtgagcaatgccaacttggaaagatctctgttttccatggagatgagaccatggagaaggcagtcttttttgtttgttttttgcgacagaattttgctctgtcacccaggctggaatacagtggtgcgatctcggctcactgtaacctccgcctcccgggttcaagcaattctcctgcctcagcctcctgagtagctgggatcacaggcatgtgccaccacgcccagctaattttttgtatttttagtagagatggggtttcgccatgttggccaggctggtcttgaactcctgacttcaggtgatccacccacctcggcctcccaaaatgctgggattacaggcatgagccaccatgcttgaggaaggcaggcttaaggttccaggcgggaaatgattttggctggacctgggcagggccatggagaggggagaggaagcaagagaagtttcaaggaagtcctgatggtctcacctccatctctcctcccacacggctgtccttccacagatgtgccacctgctggagtatttctgtgaccaagagctgcagcaccgtgtggagtccctggcagcctttgcggagcgctatgtggacaagctccaggccaaccagcggagccgctatggcctcctcataaaagccttcagcatgaccgcagcagagactgcaagacgtacccgcgagttccgctccccaccccaggaacaggtcatctgacccctgacgctggccacttttactgtctaaaccccaacctcaacatctcctgactctgatcactgaggaccctcaacctctaaacccgtgcttgacccctgaccctagtgatacatttatctcctactctctgaatcaacctgacctctgagtcacctcagactgatgctgactcttttcaaacctctggccctagtctcccaaatagtcttcattaactcacacttcgactcatgaccttagacatggactaacaattgcatcttctatctctgatctcagagttcctgctttgggatctcagaccctcattctaatctttgaccttcccctagatcaatatgctattgcaattcaaagatggtacagatgaggaagactgtcctctccctgaagagattcgacaggatttgcttgactttcatcaagacctgctggcacactgtggtaaggagtggggatcagagagtcctccccatgctaactttctctcgagacctctccagaagtttccctaagatttcctgacaaccctctacagtatcggtgctatgtaactattggttgaatgaatgaatgagtgagtgaatgaatgtgttagtgaacagttagacaatgcgtgtttatatgggtatttgggtggatggctataagccagataaatgaatgggtatgtgaattgatggatagaagaagtgggtaaaaaatggctggctggatagatggaaggatgaagagaaggatggatggatggttgagaactgggtggagagatggctggctgggtggaaggacagatggatgacctccatagtttctgatgagaagtctgctgatagtcttactgagattcccttgcacatgatgaattatttttccttggctgacttttaagattttctctttgtctttgcctttcaacaatttagtatgacgtgtctaggtgtagagctctttgaatttatcctgttgaaagtttgttgagtttcttggatatatacttactttttatcaaagttggaatatttttgacaattatttattcaaatacttttctgcccctttcctcttcctctgggactctcattatgcatatattggtacacttgatggcatcccacaggtctctgaggatttctttcattttgctttttttttttttttgagacggtctcactctgtcacccagcaggagtgcaggggcacaatcttagctcactgcatcctctgcctcctgggctcaagccatcctcctacctcagcctccaaagtagctgggagaacaggtgtgtgccaccacgcctggctaattttttaatttttttatagagtcggggttttgccatattgcccaggctggtcttgaactcctgggctcaagcaatttgcatgcctgggcctcccaaagtgctggattacaggtgtgagccactgcacctggcccatttttcttcattcttttacttttctgttcttcaggctagacaatctctatgtcctatcttcaagttcactgactgtttctcctatcagctcaaatatgctgttgaacccccctaataattttttatttcagttattttatttttcaactccagaatttctatattttaacagtctgcctttttattagtattcactactggataagtcactattatgatatttccttttaattcttcagacatggtttcctttagttctttgaacatatttgcaaaattgatttaaaagataaatgtttgatagaatgaataaatgaacaaatacatgaacatacaaagaaataaatgaggccaggggtggtggctcatgcctgcaatcccggcattttgggaggctgaggtgggtggattgcttgagctcaggagttcaaaaccagcctgggcaacatggcaagacccccatctctacagaaaaagatacaaaattaacagggcatggtggcatacacctgtagtcccagctactcaggaggctgaggtaggaggatggcttgagcctaggaggcagaggttgcagtgagttgacatcatgctactgctctccactgcaacagaacaagacactgtctcaaaaaaaaaaaaaaaaaggaaatgaaaaactccatgcatgcatgcacatatgcacaaataaatgagtgtgtaagcaggtgaataagcaaactaatgaatgacatttcccgccttcttgaccacttccaggaattcagctagatggagaggaggaggaaccagaggaagagaccaccctgggcagccgcctcatgagcctgttggagaaagtgcggctggtgaagaagaaggaagagaaacctgaggaggagcggtcagcagaggagagcaaaccccgtgaggactggggtcactggggagagggcaggggtggggtgggtagccccatgcctgcggagcctctgggtcccaaagagggcatgaggacagatgcaagggaggggtagataggcaggagtgagaggggaagagtggcgggcaaagtggaagcaggcgtggtggctcacgcctgtaatcccagcactttgggaggctgaggcgggtggatcacttgaggtcaggatttggagaccagcccggccaacatggtgaaacccccttctccactaaaaatacaaaaattagctgggtgtggcggtgcatgcctgtaatcccagctacttggagactgaggcacgagaattgcttgaatgcaggaggtgggggttgcagtgagcccagattgcgccactgcactccagcctgggtgacagagcgagactctgtctcaaaaaaaaaacaaaaacaaagatgcatgctggaggtttgcctccagagatgggggctgtagaacgtgtgtgttggaccagggtgacacagcctaccagcttagtggcaaacctctaactaagggatggcggtaaccctgaaccactgtggcttccgtggccttggggcttctcttttctttcttgatgagaggattaccatgctgagggattagacaagcagctatcattaatgttgggccaatgtgttattttgcaaactgtatattagccacatctaacaaggacagatttcctgacgttggtacaggttttatcccacaacattcaggaaacttttatggggccaactatgggccaggcactgttaccagggctgggaaatacagccgaggggggaaagtcaaagcccctgcccacgagtttagattttttctttttctttttcgtttttttttttttttttgaggcagggtctcactgcgtcgcccaggctagatagagtgcagtggcgcgatcttggctcactgcaacctccgcctcctgggttcaagcgattctcctgcttcagcctccagagtagctgggactacaggcgcgcagcaccatgcctggctaatttttgtatttttagtagagacggggcttcaccatgttggccaggctggtctcaaactcctgacctcaggtgatccacccgcctcagcctcccaaagtgcagggattacggctgtgagccaccgcacccagccaaatccacagtatttttatagaacaagtgggattgtgacatgtgccttcaaaggtgcatggcgaagtgcttctggtcggctctggtatcttgcagttgtacagtttattattcctattgaaatttttaggaagcccttgtgggctggatattagggtgaacagaacagagagattcttgggcgaatagaaaaaagtttgccaggctgggcacagtggctcacacctataaccctagccctttgggaggccacagtaggaggatcacttgagcccgggagttcgaggctgaagtgagctgtgatagccccacagcaccctagcctgggcaacagagcaagacactgtctctaaaagaaaaaaaggaaaacaatctgctagaatctgcctgctcccagcaggtggagggcgcaggtggtagtaactgggaaaacttctggaacagggggccccttccacattgttctggtccaaggccccatgtgccgacctgccctgcatggtgctccaagccttgcattgtctccttcccagggtccctgcaggagctggtgtcccacatggtggtgcgctgggcccaagaggacttcgtgcagagccccgagctggtgcgggccatgttcagcctcctgcaccggcagtacgacgggctgggtgagctgctgcgtgccctgccgcgggcgtacaccatctcaccgtcctccgtggaagacaccatgagcctgctcgagtgcctcggccagatccgctcgctgctcatcgtgcagatgggcccccaggaggagaacctcatgatccagagcatcgggtgagacaccgcccttcccccttactttgcatatccccttgggtaatgaataccctcaggatacaataacattcccttccccaacttctggcccatcctctgggtgatctcagtctctcgatggctagctcacctcctgggtaatgtctccttcccttacctctccgccctcagtggtagcagctccgcttctgtgtgactctcagcaggacattccccacccccccctttttttttttttttgtgagactgagtctcactctgtcacccaggctggagtgcaatggcgcaatctcagctcactgcaacctccgcctcccaggttcaagcaattctcctgtctcagcctcccaagtagctgggattacaggcacgcaccaccataccaggctaattttttatatttagtagagacagggtttcaccatgttgatcagactagtctcgaactcctaacctcaggtgatccacccgcctcggcctcccaaagtgctgggattagagacgtgagccaccacacccagctgaggtttaccctttttgagcttcagtttcctcatctgtaaaaccggggagagccaagcctactctgaagggttgtgctgtggcttcagtgagctcatgcgaataataataattatggtagcagtattgagcactcattgtcaaataaatctcattcacacagtaaacatttattaagcacctacttcgtgccaggcatttctaggtgtttttgagacagggcctcactctgttgcccaggctagagtgcagtggcccaatcacagctcactgcagcctcaacttcctgggctcaagcgatcctcctgcctcagtctcctgagtagctgggactacagacacacaccaccatacccagctaatttgtaaatttttttgtagaggtagggtcttgctatgttgcccaggctggtcttggactcctgggctcaagtgatcctcctgccttggcctcccaaagggctggaattacaaggcaaaagccaccatgctgggacaacatttgacaaagggcaacatggcaaagatctctgccctagaggagcctgccttgggtgcacgcctcagtctccttatgagggaaacagggacccttcctcccacagtggctgtaggaattttttttttttattttttgagatggagtcttgctctgttgccaagcctggagtgcgcaatgtctgctcactgcaacctccgcataccgggttcaagcgattctcccacctcagcctcctgcgtagctgggattacgggtatgcgccaccacgcctggctaatttttgtatttttagtagaaatggggtttcaccatgttggccaggctgatctcgatctcctgacctcaagtgatcctctagcttcggcctcccaaagtgctgggattacacgcatgagccaccgcacccggccagctgtaggaattgagtgagttcagatctgtaaaggcggtggtgctaggcacagagtgagagggtcaagaatgccaacgctgtcacagtggtggctatggccctctccggacctgggcccctggtgaccccgcacactctgcccgtgcacaggaacatcatgaacaacaaagtcttctaccaacacccgaacctgatgagggcgctgggcatgcacgagacggtcatggaggtcatggtcaacgtcctcgggggcggcgagtccaaggtgagggcccaggcaggtgctggggagctcaggggaggcagccacagagggcaggccctgaccaccctgcctgtcccaggagatccgcttccccaagatggtgacaagctgctgccgcttcctctgctatttctgccgaatcagccggcagaaccagcgctccatgtttgaccacctgagctacctgctggagaacagtggcatcggcctgggtgagaacccccgagcccaggggctgtcccccagaacccactcctggcaccccgtccaggcctgccccactttccaccagctcactcattcaacaaacactccctctcaactgtggttctggccctgtaatgagtaatgctggggacacaatagtgaccccaatagtgacagcccagagtggtcagagcttggatgagggaagtacagaccagaggaggcacctgatccaggctggaaaaagggtggtcagggagggcttcccagaggaggcgagacaagcaggagtgagatgttctccccacctctcgcccctgcaggcatgcagggctccacgcccctggacgtggctgctgcctccgtcattgacaacaatgagctggccttggcattgcaggagcaggacctggaaaaggtgtggagggcagggctgggccccaggcctaagggaggaaatcgggccgctacccggctgcttgggacacctgctgattccaaactcattctggggggcaattctggatggtccagtgcccaaccagaaggagactaatttgcagggagagaacggcacccagttgttcattcatgggatgcttcctggctgtgggccggtccgcactccacgcttcccgtctgggggcaggtccacagtctacgcttccgggatgggggcggatccgcactctaacttccaggctgggggcggatccgcagtctacacttccgggctgggggcggatccgcacgctacgcttccgggttgggggccgatccacagtctaggcttccagccaggtggccttggcacatttcttcgctctccgagcttccacttctgtgtacagtggtgaaatgcgtgggctccagacttcagcaactttgcttctgctcccctcgctccctggctgtgtggccttggataagtgacttagactctccagacccctgttgtctcatctgtacaatgaatgtagtcatagaaacgacttcatggagtcattctgaggattaaatgaattaatccagtaaagtgtttgtaaaggggcagtcagtaacgttagctgctgttatattatcattcaacaaatatgtagtgttagcttaccatatgcaaagcagtagcaatatgacagtcaaaaatccctgtctggccaggcaaagtggcttacatctataatcccagcactttgggaggccgaggcaggaggatcacttaagctcaggagtttaagaccagcctggacaatatagggacaccttgtctctacaaaaaatacaaaaagtaggtgggtgtagtggcacgtaactgtagtcccagctactcaggaggctaaggtgggaggatttgatagagcctgcgaggctgaggctgcagtgagctatggtcacaccactgcacttcacctcagggacagagcgagaccccttaaaaaaaaaagtggccagagaaagcctcattgagaaagtgacatttgtgtaaagctctgaaggaaggtgacaggtcaggtggtcatcatggggaagagcattctaggcagcgggaacagccagtgcaaaggccctgaggcaggagcaaacctcataagctggaggaacagcagaaagacagctgtggctggagcagaggtagtgagggtgagggcaggaggtgacaggtgggtcatgtggcatctcatcggtcacaacaagggctctggcttttaccctgagtgagaggaggccaggattctgagcagaggagggacgtgacctgactcaggtgttcacagggtccctctggctgtgtgtggggaacagattgaggggaaggcagaaggacagaaggacagggaggaggctcgtgttgtggtccaggtgggagacaagggtggacagaaccgctacaggaaaggggtctggatccaggcccaaagagaaggttcttggatctcatgtaagaaagaattcagggcaactccatagagtaaagtgaaagcaagtttattaggaaagtaaaggaataaaagaatggctaatccatagacagagcagccccaagggctgctggttgcccatttttatgttatttcttgatgatatgctgtttagcataacaaggggtggattattcatgcctcccctttctaaaccatgtagggtaactttctgatattgccatgacatttgtaaactgtcgtggcgctggtgggagtgcagcagtgaggatgaccagaggtcactctcgttgccatcttggttttggtgggttttggccggcttctttactgcagcctattttatcagcaaggactttatgacctgtatcttgtgccaaccttctatcttgttctgtgacttagaatgccttaaccatctgggaatgcagcccagtaggtctcaagctcctgttcaagatggagttgctgtagtttacaggcctctgacaggaccagggctaatgggccgagggatcagagctgaaccggactgaggagccgcagggcagggcagggcagggcagagggctgagccccaggaggaaggtggcatgggtctggtctctgactgagccccttctgcccccaggttgtgtcctacctggcaggctgtggcctccagagctgccccatgcttgtggccaaagggtacccagacattggctggaacccctgtggtggagagcgctacctggacttcctgcgctttgctgtcttcgtcaacggtgaggagggggtggcagtggcagagcgggaagtatggagtcactggtcacacacctccctcgagatgactgctcgcaccctgagccacagatggggtccaggcaggaatcccttccagcaggcctggggctggcaggggcctgtgttacccctggaggtgttgggtcctgtggctggcagtgttggatcctggggctggcgggagcctggtgttacccctagaggtgttgggtcctggggctggcaggggcctggtgttacctctggaggtgttgggtcctggagctggatgggacctgtgttacccctggaggtgttgggtcctggggctgcatggggaggtctctgatggtggctcatgagaccccctttccccatgcgggtggccaggcgagagcgtggaggagaacgccaatgtggtggtgcggctgctcatccggaagcctgagtgcttcggacccgccctgcggggtgagggtggctcagggctgctggctgccatcgaagaggccatccgcatctccgaggaccctgcgagggatggcccaggcatccgcagggaccggcggcgcgagcagtgagtctcccggccccctcctcaatagggcaacccgccctccctggcccctggctgcctccccaacccacccaccttccctgcagctttggtgaggaaccgcctgaagaaaaccgggtgcacctgggacacgccatcatgtccttctatgccgccttgatcgacctgctcggacgctgtgcaccagagatgcatgtgagaccctgagccagggcaggatgggaagggagggcaggcacagccgctttgaacgcctcatgcaggcactcggtgacacggagtgagctcccatatgtgggtggtcctggactagcaatgttggggacacaacagtgaccaagacagccccagggcctggtctcacagagctcccagtccaatgggggagacggacagtgacacccagagtggtcagggctgggatgggggagcacaggaagaggggtcggggctgggattgcagggcacacggagaggactcaggatggggatggggaacacagggagaggggtcaggatggggatggggtcacagggataggggtcggggccaggatgaggggtcgcagggagaggggtcaggatgaggttggggggaacaaggagagaggtcgggactggggtgggggggcacaggcagaggaacgagggctggaaactctagacagcctcctgagaaagaggcctgctctaccctcctgtgtggtaagggagggagcagagcagtcactgagtggggcaccagcgcctgatgagtgcccctctccctccctctactccccagctaatccaagccggcaagggtgaggccctgcggatccgcgccatcctccgctcccttgtgcccttggaggaccttgtgggcatcatcagcctcccactgcagattcccaccctgggcaaaggtgcagaggggatggaacttggcgaaggagtgatgctggggagggagcggctgggtccgcagggcatccccgaacccaccctccctgcctgcagatggggctctggtgcagccaaagatgtcagcatccttcgtgccggaccacaaggcgtccatggtgctcttcctggaccgtgtgtatggcatcgagaaccaggacttcttgctgcacgtgctggacgtggggttcctgcccgacatgagggcagccgcctcgctggacacggtgagcaaccctgcccagcctggccaccctccccacttccacagagggacaggagatgggtcacggtagagcagcagcagctgcttttgtttttcttgggattgtggacatatcataatccccaataccatcatcaagatagaaaatgaaaacgaagaaacactgaattccgatgaagggtgagtaggaatctccaagacctccagttataagaaatcatcatttgaggtcaggcgtggtgactcgcgcctgtaatcccagcactttggggagccgaggcgagcggatcacaaggtcaggagttcgagaccagcctgaccaacatggtgaaaccgcatctctactaaaagtacaaaaattagccagacgtggtggcgcacacttgtaatcccagctactcaggaggctgaggcaggagaatcacttgaaccggggaggcggaggttgcagtgagccgagatcgtgccgctgcactcccgcctggcaatggagcgagactccatctcaaaaaaaatattttgttcgcagtattggtttggtactgtgggcacacagaactctgtacaggaacagcaataacagaagggtgacagggcaaggaagatgagcactgagaagtgaccaccgatttggcaaagtcaaggtcactggaaatggggatgagcagtttcagcaggggacagaagccttccgagagggggtttaagagagcctggggctgtgcatggtggctcacccctgtaataactttgggaggccgaggcgggtgggttgcttgaagccaggattttgagaccagcctgggcaacatggagagatcctgtctctacaaaaaaaatttaaatattagctgggcatggtgctgcacacctgtagtcccctctactagagaggctgaggtgggagaatcacttgagggacagacattgaggctgcagtgaaccatgattacatctctgcattccagcctgggcgacagagcgagaccttatctcagaaaaaaaaaagaaaaataaattagccaggcatggaggtgcgtccctgtagtcctagctactagggaggctgaggcaggaggatcacttgagcccaggaattcgaggctgcagggagctatgattgcaccactgcactccagcctgggcgacagagacccctgtctctaacagatgaaaaagaatgtattacaggaagaaagatgagggttagagaggagataagcgtgcagaccattgatatttacagaagagccaaatctgtaatggggttcattaatctcatcgaccagttgtgtgtgtttgaaattttgcataatccaaagtagtaagtggtggggtgggggctgtgggcataggggtgtgggcatagggtgggaggagggtggtagagattgggaggagcaggttttgggggagtcatcagaagcttggatcctttggccacagtcgctcaagacaggtgccagagcagccccaggggtgtgcagcgggcctgatgtcctcaccctgcgccctaggccactttcagcaccaccgagatggcgctggcgctgaaccgctacctgtgcctggccgtgctgccgctcatcaccaagtgtgcgccgctctttgcgggcacagaacaccgcgccatcatggtggactctatgctgcataccgtgtaccgcctgtctcggggtcgttcgctcaccaaggcgcagcgtgacgtcatcgaggactgcctcatgtcgctctgcaggtggagcggggcaggcttcagggtggggcaggggcaggggcaggggcaggggcaggggcaggggcaggggcaggggcagggggaggagcaggggcaggggcagcagagcgggcctggacgggggattctacatcttgtgcattgtcccgcaggtacatccgcccgtcgatgctgcagcacctgttgcgccgcctggtgttcgacgtgcccatcctcaacgagttcgccaagatgccactcaaggtgagggcaagcgctctttagcatctcatttccaggccgcacccactggtttgctcttccctcctactgcggggctcatttgtgtcggcactgcccagcccaataaacctgcactagttagggcagcgtccccgtagaaatctcttagcatccttatttgcatactaggattcccagaacattcactttgcttcattgatgcctctagcgttccctaattagcatttaatttgcttaacagtgagccagcccccgcttcaattagcatatatttgcatggagcacaccactttccctaattagcatgtttatttgcatgcctggaccaccagacttccactattcaaatgagtgcatttatttgaataaacattatcacagctattctgaatatttgcacactgtctctcttattttttcatttgcatgctaatttgcataaagagatacccccaactcagatattttgactattttgcataatacatcgaaatcagctcctatttcaaatttgcattttagccaggcgcggtggctcacgcctgtaatcccagcactttgggaggccgaggtgggcagatcacttgaggtcaggagttcgagaccagcctggccaacatggcgaaaccccatctctactaaaactacaaaaataagccaggcatagtggagcacgcctgtaatcccagctactctggaggctgaggctggagaatttcttgaacctgggaggcggaggttgcagtgagccgagatcgtgccactgcactccagcctggtcaagagagtgagactccacctcaaaaaaaaaaaaaaaatttgcattttggatagtggaggccctcttcccaattaccatatatttgcatggggtgcagcctttgtttctacttggtatgttaatttacataagcacagattgctgcatccatatgcccatttactcactacatacccatggattaatattagcacgcttatttgtgtaaagcaataccagacacaaccagctctagtttaatgcccattttaactctaaattaagaatgctaaatttgcatactaagctgtctaggaccactcctcaataaacataccatttcttcccttattagcatatcatttgcataacccacacctccttcataatttaaaagcactggcatgcctgtgtctctctgggccttcgtctgcctgccattcgctggtgcccccctcatttgtgtgtccccctcttgttcccacccagctcctcaccaaccactatgagcgctgttggaagtactactgcctacccacgggctgggccaacttcggggtcacctcagaggaggagctgcacctcacacggaaactcttctggggcatctttgactctctggcccataaggtctgggcagcagggagccccaaaatggcctatgtggagggtttggggcccaaaattgggggtccagagtgaaatccctcaattttggggggttcaaggaggagaaggttctgcaagtttggatctaggaggatctatgggttgaggcttcgatttggaggttatgaaagagggggtggacctctagtttgggagcttggagagggcaatatggggatgatttgagcatacaattgggactgacatttgggtttcaaggagagggaccataattcaggtttggggttcagggaggagggctgatgattgcagtgtgtgagtttgaggtcctgggggtcagtaaggcttatagcgacctcctacccctgcttcacccggttttcccagaaatacgacccggagctgtaccgcatggccatgccttgtctgtgcgccattgccggggctctgccccccgactatgtggatgcctcatactcatctaaggcagagaaaaaggccacagtggatgctgaaggcaactttgatccccggcctgtggagaccctcaagtgaggcctgggggctgggagacagagaggaagatttcaggggtggagggaaccccagctccaacatctgctgaccctgtgcccccaacagtgtgatcatcccggagaagctggactccttcattaacaagtttgcggagtacacacacgagaagtgggccttcgacaaggttggcctcagggtcctcctatccaagaaaccctcaagaccccagctttccccccgacctggttcttccctgaggccccagatctccctgagaccccccagccttccctaagacccttagcttgttctgggacccccccaggattctctgtcctcggctcctccagggtcgccccgtgtgtccccaactgctgcctccccctcaccctgcctcccctccatctctagatccagaacaactggtcctatggagagaacatagacgaggagctgaagacccaccccatgctgaggccctacaagaccttttcagagaaggtgaccaggccttggggcccagcattgagggtcaaaatgaaacccccaaatttgaggattcggggaggagtgaggcaatttcacatgtttgcatctaggtggatctgtgggttaggtctccccattcatggactttgccttctctcaaacttggtagagtgggtagagactccgagagagtgggtttgattccttggctgtagtaagacttctcggagactcaagtgtctaatgggataaggagattgggtttgggaggctctgttacagagcaggtaagagacttgagttggaatccagactggaccattgcctagccacatggtcagggttttctcctttggggtccttcctccacccctctctcatcccattccaccaactccccaccctcctgtccaccccaggacaaagagatttaccgctggcccatcaaggagtccctgaaggccatgattgcctgggaatggacgatagagaaggccagggagggtgaggaggagaagacggaaaagaaaaaaacgcggaagatatcacaaagtgcccaggtgaaggcggggcctgggtggagggcaggggcacgatggggggagggtctagaacaaggggcatggccagacagggaagggatggagaggagaggggcccagggaggtaggtggggcaagaggggtgcagaaacctgagatctgggaaaggagagggcaggggtctgaagaactgcaaagggcagaggagagaaggatggggtggtttagagacagggccttaaggaaaggacaaggggtcttgagccaggggagggtggagggggtagaatggactagtggggcctggggaggggctggcctgggcttcctgctagcccatcagcccacctcccatcttccccttgtcctctcagacctatgatcctcgagaaggctacaaccctcagccccccgaccttagtgctgttaccctgtcccgggagctgcaggtgagagccctgatccttttggggggacatagggtgtctttgggggggctggcatcctctgaatctagcccttgactctgcatccactcccaggccatggcagaacaactggcagaaaattaccacaacacgtggggacggaagaagaagcaggagctggaagccaaaggtgagggcgcccatgccgcccccacgctacccccgtggattcaccgtgtggttttgctgattgccttcatgcccctgaaactcggtttctccatctgtagatgggaataataacagcgtttaccaccatggggtaatgagatgagcaccagcaagcaatgtttccgttattcgtatcttctttatcaccataattacgcatgccgggcactgcaggaaccacttcagtgagagtggcccgggtcttccccagagccctgatttctggtctttgcctccccaggcggtgggacccaccccctgctggtcccctacgacacgctcacggccaaggagaaggcacgagatcgagagaaggcccaggagctactgaaattcctgcagatgaatggctacgcggttacaaggcacgcgggttggggctcccgcggaagagcagcaggcagaacacacccggcaaaggctggaaggggcggggccagagaggggtggagccgagaggaacggggcctgaggagcaaagatggaaccagaggggaggagctaagggagtggggcctggacacagaggcggggccagatggggaggagttcgaaatgggcggggcttaagcacaggcgggaccagagaggagaggaggaagagaagggcggggcccagggagcagaggcggggccagagagtggaggagactgagaggggcggggaccggtgattggaggcgggaccaaagaggagagaaggctgaaaagggtggggcccggggaacagaggtagggccaaagaggaagaggctgagaggggcgggggctggggagcacaggcggggccagagaggggtggggaggtacagaggggcggggactggtgagtggaggcgggaccaaagaggagagaagggctgagaagggcagggcccggggaacagaggtggggccaaaggggaggaggctgagaggggccggccctggggaacagaggtggggccagagaggggagaaggctaagtggggtggggcatgggggactcagagtggagccccaacctggggtgaagccaaagctgatagagacggggccagcaggagcagaggcggacctgagaagggtgggaaactgtagggccggcgtctgggctgatccttctctccacatctccatgcagaggccttaaggacatggaactggactcgtcttccattgaaaagcggtttgcctttggcttcctgcagcagctgctgcgctggatggacatttctcaggagttcattgcccacctgggtacggagaaataccccccgcttatgcccgccccacctgcagacaccagttctgcagaccagactcacctaggacacctgttcatgcactcaatccgtcctccccttatctgatgtttattgagcttctactatgtgccagacactgttctagatgctggggtacagcagtgaagatgacaaatgacccctgctctcctgcaactactcctatgttggattcaggcaattagcatcataaataactaaatcgtttagtgttagaaggtgatcagtgttatgggaagaagaaaacaatagagccaggtagaggggattgggagtgtggagccagttgtaattttattttatttcattttattttatttttattttttattttatttatttatttatttttgagacagagtttcgatcttgctgcccaggctggagtgcagtggcacggtctcggctcactgcaacctctgctttctggtttcaagcgattctcctgcctcagcctcctgagtagctgggaccacaggcacgggcgccgccacacccagctaattttttgtattttttagtagagacggggtttcaccatgttggccaggatggtctcgatctctcgacctcgtgatctgccgcctcggcctcccaaagtgctgggattaaaggcgtgagccaccgcacccggcttgccagttgtaattttaaatagggtgttccagaaagactttgatgagaatgtgatatctgaggcaagccatgaaggaggtcagagaggagctgtgtggacctctgggggcatctgttccttgcaggcaaaggaacagcgagtgcaaaggccctgagaggtccctggtgtgagtgtcaggatgccctgtagctgaagcagagtcatcgagggggacggtgagataaacgaggtcacagaggtgactggggcagatcatgcagggctttgcaagctgtgatgaggactttgaccttacctggaatgagatggagttgggggttgggggctgagccgaggagggacgtgatccataattctggtgttcacagggtccctctggcttgactggggtggggacaggagccgaaaagggtgagaactgggcagatttctggatctattttgaaggctgaggctgctggggtgccccccagtgcctcttacaggccactaagaattacagctaggccctacaatcccctccagtttcccttagagaccccccccagcattccccttgagagctaccctcaggaacccccaaattccctccaggtgagtggcagagcaggattcgctgtcacgtctcacctcaaagcctgcctgctgagcttcagtgctgcacatccccctgacaattcccttccctctctagacctcagtttcctcacctgtgatatgggcatatgttcaccataactagccatggttctgttacttactgggtgacctggggttagttacttcacctgagtttcctcatctgaaaaatgggggttgggaaccaactgcacagacctccaagttgtaaggagactgtgtgaggatgacatgtctcacagtgccaaggacatagcaagtgtttaataattggagccagtattattattattattattattttttttttttttttttttgagacggagtcttgctctgtcacccaggttggactgcagtggcgcgatctcagctcactgcaggctccgcctccagattcacgccattctcctgcctcagcctcccgagtagctgggactacaggcgcctgccaccatgcccggttaattttttgtgtttgtatttttagtagagatggggtttcaccatgttggccaggatggtctcgatctcctgacctcgtgatccacccgcctcggcttcccaaagtgctgggattacaggcgtgagccactgcgcccggcccagtattattattttaatagtatcagttatgactgtcaccattattattgtttgaaatttatttccattttgaaattaactctaatttgtttacattgacttcttgtttcatttggttcattcattcatttattgcagattaactcagtgccatgtattcaagtttagaatgaaaagcacttatggtgggtgaggaagggcatgttccatgaccttaacccattccagtttgttttccccattgtcagcttcagaaagggtttgatcaaggagttgtcagcttcaagaaggatttgatcaagaagttgggggaaagcacattgggaggttgaggcgggtggatcacctgaggtcagaagtttgagaccagcctggacaacatggtgaaaccttggctgtactaaaaatacaaaaattagcttggtgtgtgggagcatgtctgtaatcccagctacttgggaggctgagtcaggagaatcgcttgaactcaggaggcagagagtgcagtgagccgagatcgtgccattgcactcctgtctgggtgacaagaaaaaaaaaaggagttgggggaatcagatgaaagataggagaaaggtttatctcaaagccaacacaaatgacttcataccaatactttatcccccatcatttcccaactctgctcccagcatccttcccatcagaacaccctgggttccccagccttgaacccactgtgaaccctatttgccctccctacagaggctgtggtcagcagtgggcgagtggaaaagtccccacatgaacaggagattaaattctttgccaaggtgagaggtgggcttagaagctggagggcgctggggactcataggctctccccacccctcattggaccctttatctcccccaacccgtctccagatcctgctccctttgatcaaccagtacttcaccaaccactgcctctatttcttgtccactccggctaaagtgctgggcagcggtggccacgcctctaacaaggagaaggaaatgatcaccaggtgggccgcctgtgaccctggacccagccccctgacctcacaggattgtaatcctttgcccatggaggctctgtcctgggtgctgggtgttgggtactgaccgtctcctgcaaaggcgattgaagggtgaccagccatcctagtgtacccgggactgaagggtttcccaggatgtgggactctcaggcaacttgggacaaatcgatcaccctgtccaggaaggccaactcaaggccgggcgtggtggctcatgcctgtaattccaacactttgggaagctgaggtgggaagatcacttgaagccaggagtttgaggccagcctgggcaacatactgagaccccatttctacaaaaaatacaaaaattagccgggcttggtggtgcatgcctgtagtcccagctactcaggaggctgaggcgggaggatcacttgaacccaggagttggaggctgcagggagctgggatcgtgccactgtactccagcctgggtgacagagcaagaccctgtctaaaaaaaataaacaaacaaagaataataagaaaggctgactcacccctcacctccccagcatcccagttactgcctgtgacattccagcttgcccatctctctgccccttcccatccctcctgtctccatcatttggaccccctcctggttcctctctccttgtcttctctgtccctgtctcctctaattgggtcacgctgtcctcgtctccttggcctcctcactcgctgtttctcctgccttctgtccctttctctttcttcagcctcttctgcaaacttgctgctctcgtccgccaccgagtctctctctttggtaagtggctccacaccttcggtcttcctccctaatctttctcttccccaccctgaagaaatagctcccaggttctgccttaatttgaacaacctttgttgttttcttcccctggacctggagacatggaccaggtatccggggggtagggcagtgactgagatgccctgggcctgccctcaatggagctcccaggccagtgggagagacagacctatctccagacaaggacagcccagtggggtcagggctgggcaggaggaaggccaggagagtggttgggctggggaggagggacatttggaggcgctgtaggagtctgggggggtgggggtgcagtagcattccaacttagcccgcaggtagcctcaggaagagagcggttggggtggatgtagagggaggcactgtcctctgtcctcttagccatggcatccccccggcccatcttcctctcccagggacagacgccccagctgtggtcaactgtcttcacatcctggcccgctccctggatgccaggtagggccataggcagtggcgcccactcccaccatcatcgggcccccaccccaacccctggtctcctagactctccgattccagagctgatgttcccccgctgcccttctaggacagtgatgaagtcaggccctgagatcgtgaaggctggcctccgctccttcttcgagagtgcctcggaggacatcgagaagatggtggagaacctgcggctgggcaaggtgtcgcaggcgcgcacccaggtgaaaggcgtgggccagaacctcacctacaccactgtggcactgctgccggtcctcaccaccctcttccagcacatcgcccagcaccagttcggagatgacgtcatccgtaagggcgcctgacccaagggcaggttgcggggagtcagtgtggccaacaccacccatccgggtgcctgtgagagtccctgggtgtttgaatgtgtggatttcttgctgtaagcaaagcatgcagtcagtaccttggcaggtggcaaatgagttaatgaggacgcgagctcagcagctctaacaaaagaccctaagtggactggcgcagtgactcacacctgtaattccagcactttgggaggctgaggcaggaggaccgcttgagctcaggagttcaagaccagcttgggcaacatagcgagaccctgtctctactaaaaaaaaaaagaaaaatttaaagattagccaggcatggaggcacatgcctgtaatcccagctactggggaggctgacaagggaggatcacttgagtccaagagttggaggctgcaatgagctatgatcataccactgcactccagcctggacaacagagcaaaattctgtctctaaaataaataaataataaaatagggtccttgatgttaaaaaagagagtctattgataaaggttaggaaaagtagcacttggccgagcgcagtggctcacgcctgtaatcccagcactttgggaggccaaggcggacagatcacctgagctcaggagttcaagaccagcctggccaacatgatgaaaccttgtctctactaaaatacaaaaattagccgggcatggtggtggtcgcctataatcctagctacctgggaggctgaggcaggagaattgcttgaacccaggaggcgaaggttgcagtgcaccaagatcgtgccattgcacgccagcctgggcaacagagcgagactccatctcaaaaagaaaagaaaagtagcagttggtggccagccacagtgactcatatctgtaattccagcactttgggaggccaaggtaggaagatctcttgagcccaggatttcaagaccaacctgggcaacatagcaaaaccccatcttaaaaaaaagaagaaaagaaaagtagcacctggatagggttcttctcccatccaactttgtattttgaaattttcaaaacatacaggaaggtagaaagaagaaaattgttggcggggcatggtggctcacgcctgtagtcccagctacttgggaggctgaggcacaagaactgcttgaatctgggaggtggaggttgcagtgagctgagattgcaccactgcactccagcttgggcgacagagcaagactccatctcaaaaaaaaaaaaagaaaattgttaacaatttgccctgtgtgcctacccttcactgtatggttgaaagtatttagttttttttgttgaacttttgggtgtaagttgcacacaccagggtaacctcatcccttaatgttcatcagctggctttcctagaataggaaccttctcttgtgtaaccacggtatcattatcatacctaacctaaccatatttaaatttccctcattacccacaaaatgtctttgatttttttaaaagaaattcagaatccagtcaagtttctcctgctgcatttggtggttgtgtctctgtagtgtctttaaagtctagaatagccccgccctctttttgcctcatgatgagcttcttaacttggccttctggagggcatgtggttaacctaaaattggtctgggcacagtggctcgcacctgtaatcccagcactttgggaggccgaggtgggcaaatcacttgagaccaggagtttgagatcagcctgggcaacatactgagaccccatctctaaaaaaatttttttttaattttttttttttttttgagacagagtctcggtctgtcacccaggctggagtgcagtggcgcaatctcagctcactgcaacctctgcctcccgggttcaagtgattctcctgcctcagccccccgagtagctgggattacaggcattcaccaacacactcagataatttttgtatttttagtagagatggggtttcaccatgttgcccaggctggtctcgaactcctgacctcaggtgatccgtccacctcagcctccaaagtgctgggattacaggcatgagcctctgcgccaaccctaaaaatatatacattttaaataaaatgaaaaagatagcctaaaattgcagcaatattgcagttctgtttgcatttttctggaggaagtacccctcactttcattatagagggccatgagtcctctccacggaagaaacaacatctagcctttattgagtgcctactgtgtgccccgttctagtggctttccaagtagtaactcatttgatactcacgaccaccccgtgaggaaggtactataactatccccatgttacaggtagggaagctgaggctgagagagagttggtaacttgctcaagtcacaagactcgtacatggaaggctggctgtacatctgcttgctcttccccactgcatgggcctatttgagacaagggaggtggggtggggagggcttgtcttgtgagcgcatgccgcagcctcgccccctgtctccctcagtggacgacgtccaggtctcttgctaccgaacgctgtgcagtatctactccctgggaaccaccaagaacacttatgtggaaaagtaaggagagggagccatcgtttggggctgggtggggctggaggggaagggagggagcaggggaagaagatggggtgggtgaaaagcagggtagatgttaagaattttcccgcacacggcggcagccgcggttccccacggcggccgcgtgagggcgctcagggacaggtcagccacggaggtagagccgccaggtctggggctgtgaagcaggcaggcctcgctggggaagaaagggaggcgcagaccacgggggctgcacacaggagccacgcaacactggggtcactggggagggcccctggcagtggccatgtgaccgcttctgagctgagattactgatacagcaagagcgaggctgcggctgtttccaccagctctgaagttattcagatttcaagtgacaccagcggtgcgcggtggctcacacctgtgagcactttgggaggctgaggcgggaagatcacttgagctcaggagtttgagaccagcctgggcaacatagtgagactccatctctacaaaaaaaaattttttttaattagcctggtgtggtgtggtgtagtggcgctggtgcctgtaaatccacctactcctaaggctgagatggggggatcgcttgagctccagcctgagcagcatagggagactgcatctctacaaaaacgactttttttaaaactagctaggcatggtatggtgtgtgcctgtaatcccagcgactcaggaggctgaggtgggaggatcacttgaacccaggaatgtgaggttgctgtgagccaagatcaggccactgcactgcagcctgagtaacagagcgagaccctgtcttaaaaaacaaaacaagtggcacacatggatgaatggcagctctgtcccaaagggttctgggaggagccgtttctatggagatggggctgggacccaggaccccaaagagggggacacgtggcagctaaacacagccccgtcttccaggcttcggccagccctcggggagtgcctggcccgtctggcagcagccatgccggtggcgttcctggagccgcagctgaacgagtacaacgcctgctccgtgtacaccaccaagtctccgcgggagcgggccagtaagctgtgtggggcgggagcagtgctgggagtccaaatctccccagcacagggccttggggagaccctaatttgggggtagtgtggctgggctgggctgtgagcggctgaggattccccaggttgggagtgccacacattcaggaaccccagagtttatggttcgggggcatttcaaggccgttacatggggagaatttagagattaatttgatttttgaaaacagaatctattgataaaagttaagaaaagtagcacttggtggccaggcgcagtgggtcacgcctgtaatcccagtactttgggaggccaaggtaggaggattgcttgagtccaggagttcaagaccaacctgggcaacatagcaaaaccccatccatggaatttggagctatggaatttattttagtgatggtgacatttgagggcatcatcaagcttggagacatagggtgaggggtatttgagcataagaggattgagggaaggcagggttcattcattcattcagcaaatatgtatcgagcagttactatgtatgaggcgctgtcctagtcacctgaggttcagcagtgaacagataaaacagacaaaaatcccctgagtcctgggtccagaggctagaatgaggtgtggacctgggggaaatatacgctccaaggcaggaaacttgtcttcttggtcagctgttctcccagaatggcacctggcccagagtcagcaagtgagcaagtgacaggttgtcggtttcaagggactgaaccgggtgtgggattcagagagacaaggcggggagacagggtggggttggaaaaggtctcttttggagtatgctgtacagcaggggtgaggggaatgggcttgggatgtgggagattttaggagggaaggtttctaggggtgagattttagggagcagacaggctcgggggtgtgaagtgtttgcggggccactgagtttcaatgtgagggttgggagaggtagttgggttggagggtgagatgggaagaatagggtttgggagactgtttaaggggggtggcaattcaatggtgtctgatgtattgcgggggaggccagggcactgaggtctgggggtgatggcttgacattccctgcccccgtccctgtaccccagtcctggggctccccaacagtgtggaggagatgtgtcccgacatcccggtgctggagcggctcatggcagacattggggggctggccgagtcaggtgcccgctacacagagatgccgcatgtcatcgagatcacgctgcccatgctatgcagctacctgccccgatggtgggagcgcgggcccgaggcacccccttccgccctgcccgccggcgcccccccaccctgcacagctgtcacctctgaccacctcaactccctgctggggaatatcctgagaatcatcgtcaacaacctgggcattgacgaggcctcctggatgaagcggctggctggtgggtcggggggcactgggcctctgaggggtgggtcagcagcctgggctcccttggcagatggtctgaaagggagacccatggtcccctcggagttgggaggagtcagagtgtaggttttttcagcatcaaaagaccaggggtcagctgggcaccgtggctcacagctgtaacaccaacactttgggaggatcagttgaggccagccatttgcgaccagcctaggtaacatagcacgaccccatctctttaaaaaacaaaacaaaacttttttttaattagccaggtgtggtggcacatgcttatagtcccagctacttgggaggctgaggcaggaggatctcttgagcccaggagttggaggctgcagtgagctgtgattgcaccactgtactccagcctgggtgacagagtgagatactctctcaaaacaaacaaacaaaacaaaaggaaagaaagaaggaaggatggagtgagagagggagggaataaaagggaaggaaagaaggaaggaaggcaggaaggaaggaaggaagaaatggatcctcaaagcgttaggtttcctgattcagaagtttcatgtcagggccaggcacaatggctcatgcctgtaatcccagcactttgagaggccaaggtgggtggatcacttgagaccaggagttcaagactagcctgggcaacatggtgaaacctcgtctctattatttaaaaaaaaaaaaaaaaaaaaaagaaatatttgtgtaaggaaacaggttgtagatcagggtcaacctagaaatcaggagctgggatcagaggccagggtaaggggccagaggctggggtaagaagcccattcacaaccttggggtcatagccagaaatcacatagtgaggtaagactctgggtatgggccaggtcagaggttaaagattggggtcaggggtcatgctagttaagggtgaggtaacaggccaggtgcagtggctcacgcctgtaatcccagcactatgggaggccgaggcgggtggatctcctgaggtcaggagttcgagaccagcctggccaacatggtgaaaccccatctctaccaaaaatacaaaagttagctgggtgtggtggcagacgcctgtaatcccagctactcggggctgaggcaggaaaatcgcttgaactcgggaggcagaggttgcagtgagccaagattgcgccattgcactccagtctgggtgacaagagtgaaactctgtctcaaaaaaaaaaaaaaagttaggtaacaggtgaggcgtctgttgttgggggtcagaggtcagggatttgtgccaggctggggtcacaggatagggactgggtcttaggttcaggttaggggctatggctgggatcagtgttcagggactatatccaaggttagggtcaggctggggtcaaatggcagctgctaggttggagatgctgtttgggagtcgggctgggaacggagtttggggcctgtgtcagaggccggaggtggcatcagagcccatcgcacccctgcagtgttcgcacagcccattgtgagccgtgcacggccggagctcctgcagtcccacttcatcccaactatcgggcggctgcgcaagagggcagggaaggtggtgtccgaggaggagcagctgcgcctggaggccaaggcggaggcccaggagggcgagctgctggtgcgggacgagttctctgtgctctgccgggacctctacgccctgtatccgctgctcatccgctacgtggacaacaacaggtcagcggggccccgctgtccccatgccctccgccccgacctcccacgtcctccagccccatctgatctccgcctcctgactggctagaaacttcttccaatgctctggccccaccaaccttctgactcttcctcctggtttcttctggctttgagcacattggtccaacgacagccagcccacttgtttgtttctttttgtttttggtttttgggtttttttttgtttgtttttgtttttggagacagagcctcgctttattgcccaggctggaatgcagtggcgcgatctcggctcactgtaacctccacctcccgggttcaagtgattctcctgcctcagccttcccagtagctaggattacaggtgcatgccaccacgcccagctaagtttcgtatttttagtagagacagattttcaccatgttggccaggctggtcttgaactcttgacctcatgatttgcctgcctcggcctcccaaagtgctgggattacagctgtgagccaatgcagctggccagtgtgattttttttaaatcattctcctaatgctggacatttagattgtgtcgatttctttgtcactatgcacaacaccgtaaggaatagtttgctttttttttttttttttttattgagacagggtctctctctgttgcccaggctggagtgctgtggcatgatcatggcttgctgcagcctcggttcctgggttcaagcgatcctctgcttctgcccctgagtagctgggattatagactcacaccaacatgctcggctaattcttgtatttttatggggtctcactatgttgcccaggttggtcttgaattcccggggtcaagtgatcctcccacctcagcctcccaaagtgttgggattacagaagtgagccaccacacttagctgctttttttttttttttaacacaacaatacaccatgaaagacatataggccgggtgtggtggctcatgcctgtaatcccagcactttgggaggccgaggtgggcagatcacctgaggtcaggtgtttgagaccagcctggccaacgtggcgaaaccctgtctctattatgaatacaaaaattagccaggcgtagtgacgcaggcttgaaatcccagctactccagaggctgaagcaggagaatcgcctgagcctgggaggcagaggttgcactgagctgagatcgtgtcactgcactccagcctaggaacagagcgaggctccacctcaaaaaaaaaaaaaaaaaaaaaaaaaagatgtatagattcacctcttttgtcttggtggtcgtgtgacattctctgctgttggatatagttcaatttttcaatcagtaaatatgaacaaattgtggtttattcatacaacagaagactccacggcagtgggagtgaacaagttgtttctatgcacaatgtgattggctttcacaaatgttaggtggaatgaaagaagccagaaaaccaagaaataaactacatattttaccatctgtttaatgttcacgagcagataagaataagtttggggccgggtgcagtggcttacaactgtaatcccagcactttgagagactgaggcgggaggatcacttgagctcaggaatttgagaccagcctaggcaacatggctagaccctgtctctacaaaaaaagaaaagaaatacaaaaattagtcaggcatggtgacacacacctgtagtccttgcctcaggctgggactgggaggctgaggtgggaggatcgtttgagcccaggaggtcaaagctgcagtgagctatgatcacaccgctgcactccaacctgggcaacagagatagaccctgtctcaataaggtttgtttttttttaatacaagtaaatgaataaaataaaatatgtgaacctacttagattctgaccctgtctcaaaaaaaaaagaaattttatgctgggtgcagtggctcgtgactgtaatcccagcactttgggtggccaaagagagtggatcactcaaactcagtctcaaactcagaagtttgagaccagcctgggcaacatgcaaaaaccctgtctctactgaaaatacaaaaattagccgggcgtggtggcgcatacctgtagtcccagctaagtactcctgagtgggaggctgaggcaggagaatcacttggaacctgggaggcagaagttgcagtgagctgagatcacaccactgcactccagcctgggcgacagagcgagaccctgtctcaaaaaagaaaaaaagaaaatttttttttttttttttgagatggagtctcgcccaggctggggtgcagtggtgcgatctctgctcactgcaagctccacctcccgggttcacgccattctcctgcctcagcctcctgagtagctgggaccacaggtgcctgccaccacacccggctaatttttttgtattttttagtagagatgaggtttcaccgtgttagccaggatggtctcgatctcctgacctcgtgatctgcccgcctcggcctcccaaagtgctgggattacaggcatgagccactgcgcccagctgaaagaaaaaattttaaaaagtttttagcctagaagttagaatatggatgatttttcaggaggaggaagggggagtggctgggaggggccatgatagtacttccagggaccagaaatgtcctatttcttgacttcggtgctggctacacaagtgtgttcatttgtgataattcaccaggttgatatttcttaatatgtaggttatataatacatatgtatgtatcatgtgtgtctatgtattgcatgcatgtattatatttatgtatttcgatgaaaaggttagacaaagttttttaaaaaaggaatagtcaggccagggaaggtggctcacacctgtaatcccagcactttgagaggtcagggaaagaggatctcttgagcccaggagttcaagaccagcctggacaacctagggagaccctcttcctacaaaaaataaaataaaacattagccaggcctgggcatggtgacgtgcacctgtagtcccagctactcagggaggctgaagtgggaggatcacttaagcctgggaggttgaggttgcagtgagtggagatcgcatcactgtactccagcctgacagattgagaccctgtctcagaaagaaagaaagagagagagagagagagaatggatcgttaaaaaattttaaatgttcagctgggcacagtggcttacacctgtaatcccagcactttgggaggccgaggtgggtggatcacgtaaggtcaagagttcaagaccagcgtgcccaacatggtgaaaccccgtctctactaaaaatacaaaaattagcccggtgtggtgtcgggcccctgtagtcccagctactcgggaggctgagacagagaaaaaaaatttttttaatgttcatctgcatggccagatgaccctagaaaccccatccctctgactggatgtctcctggtccccatctcctcctccaagatctctctctgggcagcccccttccctgggatccccaccccctccctcacctcccctccgctgaccccagggcgcagtggctgacggagccgaatcccagcgcggaggagctgttcaggatggtgggcgagatcttcatctactggtccaagtcccacgtgagtgcccaccccaaccgccctccccacaaccagaggagccgcagcccacaggcgcctgccttcacctgtccggtctgcaacactgcttcccccaccagaacttcaagcgcgaggagcagaactttgtggtccagaatgagatcaacaacatgtccttcctgactgctgacaacaaaagcaaaatggctaaggtcggggcttggttctgggaggagcacttggcagagagggcgggagcaccctctaggacttcctacctggcctgtcctcacccagccagcccgtcctgggcgcaatccctgcagtcctcagagcagcccctcttacctcctctccctctcccttcctccccagctccttcctcctcctgtatcttctccctcctcccatctccctcctcctctccatctccctcttctctcatctctgtctccttcctcctcctgtatcttctccctcctcccatttccctcctctccattttcctcttctccaagcctctctctcctcccatttccctcctcctcctcctccccattttccccctcttccatttctttcttcctctccccattaccccatttcctgctttcctccctatccttctcagcactgcccttctcaggtctcagagaacgaccccccaccccgagccaaggcctggaaatgcccagctagagaatacatggcgggtggggcagaggaggtggggtgctggcaacttggagttgggcctgggcttctctgcggggctggggtaacccttcttgtctctgtctgcggtccggtgaagcaggcgggagatatacaggtcagccccacatctgggaccttccgcatgtctcttggctaatgccctcttcccccagcctctgcacgcccccgcctcgagaaaacccctgcttctgttccccacccccgtcctcccctcccagcccccacccatcctccttcccttcccttccctccccaccacccccatccgttcccatcccaaccctcagcttttggcaatttgacttcttttctttttcttctttccttttttttttctggacttttgttcccaaaaaaaaaaaaaaaaagaaaaaaagagcaactctcagcttttaccaaagcatcgtgggctgaggtcaagggtaatgggggtgggagaggcacacggagcatggttggggagggggcagcaccctcgccgtggatggtttaaagcttgggctctggactgtatggactggggttagaatcctgtcttgatagttagccgtgtgaccttggttggggtcatccttttgagcctctgagggcatccagccagcagcccccaccccagggctctgcgaggactcagggagaagctgcatgtgtggcctgcagcagtgcctggcacaggggtcatgctcaaagttgccagccggcgtggatgtggctctgcccaaaagcttgtcatcagggcttctcgctggcgtgactggggtggccctggccccgggtctgcacccaaggctccagaacacggctgtgggactctgtgccctgtgtctctgcttccagatctttctggatgtctcttgcatctttggtcttcctgtctccttgtctttttcagtctctcagtgtctttttcttgcaacttctcttgtcgcttgaactctttgtggacctgcatctttgtttcattcttgagaacttggttttgggatgtgaagtgtggggttgtgcatgctgtggagggggtattgtactggggttcctaggggattctggaagaggactgctagaagttgagacaggcccagaacgggggaaaatctggatgggcctgggttagaaattggagccaggcaagcatggtggtatgtgcctgtagtcccagctacttgggaggctgaggcaggaggatcacttgaagccaagagttcaagtccagcctgggcaacatggcaagacaccatctctaaaaataaatttgtttaaaaaacaagaaactgggaatttgggttgtggacttgggtctggagggtctccggtcatggctgtgggcctgaagtgtagagtcagcaagtctggggtggaaattgaggtgtcgtcggcagttggggagggagtgcctggtgtccagactggggcctggggtgtggatgatggccgcgggttggggctgaggcatgggattggggcttgggctggtgctgagccctgtgtccccacagtccggtggctcggaccaggaacgcaccaagaagaagcgccggggggaccggtactctgtgcagacgtcactgatcgtggccacactgaagaagatgctgcccatcggcctgaatatgtgtgcgcccaccgaccaagacctcatcacgctggccaagacccgttacgccctggtgcctgcccagccccgtcctcggaaccttccaggatgccgcccagcacccactgaacccctgggaccttagggaacaaccacaatgccactgagccccccaggtccctgggagccttcccttcagaccccactgagttcttttccgggatgctgaggactcactgtgcccctgggatgccctgaggaccccgttcaagatattgccagggcaccacagacctaagagccctcactgaaacctagaaaagctctaggacccctgggacccgcatgaggactgcaggaccccactgcccccccaccggaccatgccaaacctgctgagaccctgagagtccccccaacaagatgagcccctgagatcctctgaaccctccaccaaggccccttcaagccccttgggacctactgagaccctcatgacccctccttccctccctgccaagactgaacctctgggttcctgctgagcccttggctcaccatccctttccttcaggaccctgctgacacctgggccctgttgaagcccaactaagcccccaagactctcaggggctcagggagccctgcgaccctgcataactccccaggatccatgaaccccaagcccgggactgtacccaaacctctgaggtctcaactgtcctggagaccaaaatacccgggctgtagaacctcttaagcttgctgggatatcaaggaggcctcccgggaccccacttaccccttgtgtgggacaacaaggacaatctccctcctctccgatcctttccagcttcagggactctaaggaaccctcccaggattctgccccaagacccctatagccctccccccaggaccacaccaacaccctgacaacctactaaccccctggacccctaaagaccaccgacttctcccctgctaccaccaggacaccccttccctcagaacctcaggcacctcccaggactgctgagtcctgccaggacgccagagagccctccagggctccatggacccctcaccttggtccttgagggctccccgtcctagaaccccagtgaacccccaccctgctgatgccccctttggcccctgtgtaaccagtgactccgttgacctacgtgatcccccatgacctctgctgaccccttctgatcttcaaagactccctgccccactctgaccccccagtcatccctctttggccatatttgacctttgatgagatcctcttgtcaccctttgcctcttcccagacctccacgaggcccctcgaatccttactgtatcttcaaggtgactctgtgaccctccggcccctctaggaccccttctgaccccgtcaacctctgcatccttttgtttctctcagacccccacccccaccccagaaaaacctcttcagttcctggggtgctgggcctggaaggaaagggttgtgggtcaggaaggaggatgggacctccagagtgacccagcctggctctgtctccccagaaagacacagatgaggaggtccgggaatttctgcacaacaaccttcaccttcagggaaaggtatgcctccttcctctgcaagcaaaagaagcaagtcagaaagtaaccacaatattagtgaaggtttgagcatttaccaaagaccaggcattgaagaaagacctcaaaggtcaggagtttgagaccagcctggccaatgtggcgaaaccatgtttctactaaaaatacaacaattaggccgggcacaatggctcatgcctgtaatcccaacactttggaaggccaaggcgggcagatcacctgaggttaggagttcgagaccagcctggccaacgtggtgaaaccccgtctctactaaaagtacaaaattagctgggtgtgatggcgggtgcctgtagtcccggctactcaggaggctgaagcaggagaatcgcttgagcccaggaggcagaggttgcagtgagctgagatcgcaccactgcactccagcctgggtgatggggcgaggctccgtctcaaaacaaaaagatgaagaagaagaaaggcctcaacatgcactcacccattgagtcctcccaaaaacggaaaggggacatccggcggacactgtgggaagggtccctcacgccggccactccttcttcctcccttcaggtcgaaggctccccgtctctgcgctggcagatggctctgtaccggggcgtcccgggtcgcgaggaggacgccgatgaccccgagaaaatcgtgcgcagagtccaggaagtgtcagccgtgctctactacctggaccaggtgggtggggccggaggggtctttctactgggtctctgggcggagcctggcggggggaggggcttcaaggatgtgggtggggtctggagatgactattaagttttggggcagggcaggaggtggagcctcgagtttaaggcgaggcttagaatggatcgggggaggggtctgctgcttaatcttgcatctgggggcgggacagggaaggggcagatctttaggtctaggggtggggcctagaggagatgcgttgagtttgtgggcagggccttgggtgggtcgtagaattggtcgtggcctggctcgtggtcctggctctgtgggacctggcctaggatggaaacttaggtctggaggcggagtcaggaccctgactctgttggtggagacaaggttttccttctgccgtgtgagtcttaacctgaatatggacttcgacacagctgggcagtttcatccagggctgggagtgagaggggcagggtctggggatgtgactgtcctgctatcccctccccagaccgagcacccttacaagtctaagaaggccgtgtggcacaagcttttgtccaaacagcgccggcgggcagtcgtggcctgtttccgtatgacgcccctgtacaacctgcccacgtaaggcccccagggacaagggaagcgtgaagggctgcggagaaagggtggctggagagtctggagaatggagggccaacgtgatggggccttgagggtggttgggggctgcaggcgcatgggaggtcgggaagcacggaggagggcgcgtcccagtgacgtcacacctctcccctgcaggcaccgggcatgtaacatgttcctggagagctacaaggctgcatggatcctgactgaagaccacagttttgaggaccgcatgatagatgacctttcagtgagctgggacccgcctgggggagtggggggcgagctggatagggctggggcggaggccacccttggcacacctccaggggtcggccctccacatcaaggggtatagaaatgccagctcctggcttgagtagaaccaaagtagggcgcaggatgtgggaaaagagaaaaaaaaatccagaccaacagggacatgggggcagtgacaggaggggactctagaaaccctctccccaagtctcccctctcccaccagaaagctggggagcaggaggaggaggaggaagaggtggaagagaagaagccagaccccctgcaccagttggtcctgcacttcagccgcactgccctgacggaaaagaggtgaagactcttgccagggccccagaaatgcccccaaggtcctggggccacccccagcccagcagcttccctgtgcctcaggagaggccctccaggtcctgggggagcccaagacagacggatctttaaatatcactttgctggtcaggcacggtggctcacgcctgtagtcccagcaatctgggaggctgaggcaggcaatcacttgagcccaggagttcaagaccagcctggccaatatggcaaaaccccgtttctacaaaaatacaataaatagccaggcttggtggtgggcacttgtaatcccatctactcaggaggctgaggcggaagaatcgcttgaacctgggaggcggaggttgcagtgagccgagatcataccactgcactccagcctgggcgacagagcgagactctgtctcaaaaagaaaagaaaaggaacgtaaatgtcactttgctaggacaggcacagccaacatacaccgttgcatggctgaacacttcacaagggcatgtctgaggggttcgtatcacagacaatgtagattaactaggcttttctagaagaaagtgtcttgctcaaataaaatcagtatattatgaaaaaaatccatatgtatgacaaatttccaacagacagaagtagtggggaggttttctgtaattccctcaaaagcttcatgtaggctaatgacaggcttagtaataaataattgtgatgcagatggcgcagctgctgccgctgctgctgacagtagcaggcagccattcatcaaatgcttattatgtgtcaggcaccaagctaagcggggatatctatatcctctcacttaaccgccacactgtgagacggattattgcatctcctttgtgtggataagggaatgaaggcacagggatttatttttcattttgtttatttatttatttatttatttttgagatggagtctcgctctgtcacccaggctggagtgcagtggcacaatctcagctcactgcaacctccgcctcccaggttcaagcaagtgggattacaggcgcccaccactacgcccagctaatttttgtatttttagtagagacgggctttcaccatgttggccatgcttgtctcaaactcctgacctcaagtgatcttcccgccttggcctctcaaagtgctgggactacaggcgtgagccactgcacctggcctacttttttattttttgagaagatcttgctcttcttgcccaggctggaatgcagtgtcatatcatagctcattgcagctcagaccccccactccacatcaccccaggctcaagagatcctcctgcctcaacctcctgagtagctgggactacaggcacgtgcctccatgcctggctattttttttttttttttctggtagagatgggggtctcactatgttgcccaggccggtctcaaactcctgaactcaagcaatcctccccactcagcctcccaaagtgttgggattacaggcatgagccaccgcgcctgtcagggatttgtttttcttacataacgtgaagtcaagagctaaagacttcaggactgggcagtggcacagggacactgacaggggcccagggtctttctagctttctgctctgcccttcttagcttttgtctgtagtcctgggtggatgctgcacttctaggcatcacagccacatgccaggcagaaagaaggacaaagggtccccactcttcaccctcagcaagatctttggtctctctctcttttttttttgagacggagttttgctcttgttgcccaggctggagtgcaatggcgcaatctcggctcgctgcaatctccacctcccgggttcaagcgattctcctgcctcagccttccgagtagctgggattacaggtgcatgccaccatgcccagctatttttcttttttctttctcttttttttttttttttttgtatttttagtagagacagggtttcgccatgttgtccaggctggtctcaaactcctgacctcaggtgatctgcccaccttagcctcccaaagtgctgggattacaggcacgagccaccgcgcccagccttctttggtctctttatctctctggtgagcttccacacagatctcattggccagaaattctgacataaggccatctcgggctgcaaggtgatgaagaatttgagcatcccattttgcatcctgtgggagagcgatggctctggagtttggccatccaagttgagtcccagcgcaagctgtgtgatcccagccgagaagggtctttgtatcttagttcccccaccgataaaatagggctattaacatacccacccaattggatgactgtgagggtcagtttgttaatatatacaaggcacctagaacaggcactgacatggtgttagtgtaaacactcagcaggtgttggccattgtagaggagacccaagcagaaagggattggccatacttgttattgagctgacaggtggcaagatggctctgggagctccagccttccatcactccattttagcatccccagtggaaagggagtgcctccaccattagctccagcaaacctcactgaatgggccaggcgcggtggctcacacctgtaattccagtactttgggaggccaggagtttgagaccagcctgggcaacatagcaagaccctgtctctacaaaaaaatggaaaaattagccaggtgtgttggtatgtgcctgtagtcccaactactcaggaggctgatgtgggagatcacttgagcctgggaggttgaggctgcagtaagccttgatggcaccactgcactccagcttggccaacagagcaagaccctgtctcaagaacaaaataaacaaacaaaacaactcccagaatggattttactggacagcatggacaacatgaccatttcttacctgtcatcatggccacacagataaaagtcctcatcggccatgcatttgtcacaagccaccctggcaatggccactccagccacctgagtcacacagcctgaacatggggagggttggccctccaaagaaaaccagaagctctttttttttttttttttgagatggagtcttgctctgtcacccaggctggagtacggtggcgcaatgtcagctcactgcaacctctgcctcccgggttcaagcaattctcctgcctcagcctcccgagtagctgggattacaggcaagcaccatcacacccggctaattttttgtacttttagtagagacggggtttcaccatgttggctaggttggtttcagactcctgatctcaagtgatctgcctgcctcagcctcccagagtgttgggattacaggcatgagccaccgcaccctgcccagaagctcttataagatgggggtcctctccaccgggtcctgaccactcccctgcttacttccccagcaaactggatgaggattacctgtacatggcctatgctgatatcatggcaaaggtgaggccctacccccctcttctggggcagatttccctctccccacctgcagtgcttgtccacaaaaagggctggggcgggatggaggggtctgctttgttcatcccttaactgatgccccctccccagagctgccacctggaggagggaggggagaacggtgaagctgaagaggaggttgaggtctcctttgaggtaggtgggctcaggaggtcctggagggaagggatgggggaccctgactgcagtcatctcccattcattcagcatgtgttcacagagcaaagctctggggacacagcagtgaccaagtcagtccactggggagacagatacacccgccaaactaacaccacggagtgtacaccatggtcatgggggaagctcaggcagaggggtcagggctggaattggggaggctcaggcagaggggtcagggctgggattgaggaggctcaggcagaggggtcagggttgggatgatggggatacaggcagaggggtcagggccaagatgggggaacctcagggggataaagcagcccaaacaaggtgcctgacccagcctgcaggaaaatgtatcagggagggcttctcggaggaggggacttctgagcagaaggataaaaggagcctgccagttgaagaaaaagagaaaaatgttctacgtagggagaatagtatatgccaaggccaggcagcaagaaagagctagtaaacatgcaattcaccgatccattcattcattgagacagttagcaagcatttacttcatagttttcttcactgtttctgtgccagagtcccttctggcatctggtgaagactttctcaggatcatgtttttaaatgtataaaatgaattcatagcagaggaaacaagtattgaatagctatcaaaatattttaaaaatgaatttgtgatccagtaatacttgtacattgttaatctatcaaataagatctaaggctgggcgcagtggctcacacttgtaattccagcactttgggaggccaaggcgggtggatcacctgaggccaggagttcaagaccagcctggccaacatggtgaaaccccatctctactaaaaatacaaaaatgagctgggcatggtggcaggcacctgtaatcccagctactcaggaggttgaggcaggagaatcgcttgaacccgcgaggtggaagttgcagtgagccgagatcacgccattgcactccagcctgggcgagactccatctcaaaaaaaaaaaaaaaagatctagcagtagatccaacagctactataattgagaagtagtgatgaacataactgatatttaaagacatctttgagccattgtgagtgagtctctcttcctggaccaaaagagcagaatttgaataggaaatggttctaattctgcaacaataatgtgatatggaatatacagcaataataatgtgatatggaaccatctgtaattttttttttttttttttttgagacagagtctcgctgtgtcgcccaggctggatggagtgcagtggcgtgatctcagctcactgcaacctccacctcccgggttcaagcaattctcctgcctcagcctcccaagtagctaggactacaggctcatgccaccacgcctggctaattttttgtatttttagtagaggcggggtttcactgtgttagccaggatagtcttgacctcttgacctcgtgatctccctgcctcggcctcccaaagtgctgggattacagatgtgagccaccttgcccagccacatctgtgatttttattggtgacaaagccacaggttctgctaatatcgctgtgatttatggcttcatccatataggaaggaaatgcttcatttctgttagagggcggaaaacataaaaatgtaacttttcatcatccaagttcacagatggcctggaggcccatgggcccaggttaagactgctgcatgcccagctctgatttatgtagatcttgcctaatgcctagccccgtgctaggtacaggagatacatcgagggtgtgagccccaggggatggagggagctcatggttgaaggagtgagttgtggatgtggctggaacagggagggcagaagtgagaatgtgagggggaaaggctgggctggaaagcctggacttgccttcatgtgtctgcctcccttcccaggagaaacagatggagaagcagaggctcttgtaccagcaagcacggctgcacacccggggggcggccgagatggtgctgcagatgatcagtgcctgcaaaggtgcccctcacatgtgcactggactcttccgagtgcactcatcctaacctcactcctcctggctcgcccattccctgtggacccatttgccgcccctcaatgcctgtggtttgcacgcacaccccagcccttgcagcttccccttgtatacctgccttgcaatttctcactcatccttcaatcacgatcacccctgcatgcacaccttggcacactcttaaatccccttctctcacatcccttgggatggctgttttctggtgggtggaacacactgccttccaactgggtggaccatcttttttctcccactccctccaggagagacaggtgccatggtgtcctccaccctgaagctgggcatctccatcctcaatggaggcaatgctgaggtccagcaggtaacagaggcaaagggacttcagaagaaggcaaggagggatgagaggttcctgtgtgactcccagtttctcctcccctgcctcgccctctgcagaaaatgctggattatcttaaggacaagaaggaagttggcttcttccagagtatccaggcactgatgcaaacatgcaggtaggttcgagtggacctcttcttgttaagctgtgtttggtgccactgccaccccactcctggtaccatttccagttctgattctgctctttcagtccagggaaagagactcactcagaatcgctcaaataacagggaatttattataagaattaatgtagaacaataagggaggcaaaatgtcatagacttgaagaatgagttgcattatgaattccagacagtggaaccaaaaacttgagaatttaaggggaacttggcagtgggagatttaggagctctctgatgatcccaattaatctgcctctactgttgtctgcctttattcacctcttgctgccggctgatttttcctaccctctgcagcttttgctaaatgggtggtttctggttcctcattatttcagcttgcgcatggttcatcctggcccaaccatatgtcctagcttctgccaactcttcatttctgcttcctcttgatttcagcgcatagatggtttactgtggctctccaggctaccatggtggggagctgccaggccctgggagagaggagggcagaggcttcatcacataccccctatctttcctttcttttcctcagcgtcctggatctcaatgcctttgagagacagaacaaggccgaggggctgggcatggtgaatgaggatggcactggtgaggccctcccttgggcttcccaccccctgagacatcttcctttgggattcctcccaccccacccccacccgccattgcccagagctcccttcctccaagacactggttcccaagggctccctcgggtccctccctctgctgtggtcccccagtcccaccccctccatccccctggggtctccctccccatgtccaccacccacctccgcccccccccgccaccagaagtcattctgtcttgtgttctcacccatcactacatggaccccaccctccacgtgccccaaatgtcacgccctggttgctgttctcttattaatgtccctaatccgggttaatcgcgtctcctctttgccgtgttgtgacgtgtctaacctttctacccggatcctcgctcctgcctttctacctctatgtcttcatctctctctctccctctccatcctcttctttcattccctctgcttttaccctcatttcctaccctcttccctgctaatccatttccttctgtctccttatcactctgcctttctctctgtgggttgttcctctctctctgtgtgtctttctgtgtctctgtccctgactgtcattgtgtgtgtttgcggtctgtctccctctctttttctctcttttctcctgcttcctcctcccatcctgttggctgccccagtcatcaatcgccagaacggtaattcccccagcccacccccgtgctgtgctgctgtcacccacccctcctaaccccgtccacccctccacctaggggctgaggatctgggacgtggaggggagggagggacccttcagcaggtgcaccctgccagtgcaaaacctggagatcaggagtctggggagcatgattcaggtcccagatcagccactgagaatacatgggcctgtgaacaagtctcttaccttccctaagcttcactttccccatgtgtgaagcagaagctagagaacatggtaaagatctctttccagctggatattgtcggacttccagacccagattcgcagtcccggtgtggagtgatccccactcccacctactctgctctctgcaccccgacctcagattggtcagtcagcgtttcccatccaccaaccgaattggttgcctccggcatccactctgattggtgtgcgcctgcctcctctgcgcctgcctcctctgtgcctgctctggttggcccatttgcggtctagcctcctcccctaccgcccaccatgatttgcttctttcagatgcccattctgattggcccttgtttacacgcctcccctgtgctactcctggattggctgctttcaaggcatctgggccaattggctggctttcaatccccatcccttatccctcccagcccaatcttcccctgcccagagcctttgtgtgaaggtgacccaaacccccataatccattaacctccacggtctgaaggggggctgagggcattaccagctgcctgaatgtctgctaggtcagcagactctcccgaacgtaacacaagtggtgacatcagagggcactgatgtagaaagacacttgaggccccagcttcatgactcagggccccttgggtctccgtctgctgatgtcatgggctctgaggtcaagaccgcctggcgtcatggatgcccatggccctcacagtgtctttggagtggcagctgctcctcccagcacccccatgctttgtgcatgcgtgtgcagtgtgcatgggccttgtgcatgtgtgcgctgtgtcttggcgcatctgacccctcctgggccctgtcccctcccttccacctaggagagaaggtcatggcggatgatgaattcacacaagacctgttccgattcctacaattgctctgtgaggggcacaataatggtgaggaggaggggtgtggggtggaggggaagccgaggtttggggctggtacggaagggttgactgaattagtttccgcccctcctcctcccccggtcaatgatggccactctccagccagtgtcaatccacctagctttcaaaatctctctggaggctgggcgcagtgactcaggcctataatcacagcactttgggaggcaaaggctggtggatctcctgaggtcaggagttcgagaccagcctggccaacatggtgaaaccccgtctctactaaaaatataaaaaaaatagcagggcgtggtggcacatgcttgtagtcccagctactcaggaggctgaggcaggagaatcgcttgaacccatgagatggaggttgcagtgagccaagatcgcaccattgcactccagcctgggcaacagagcaaaactccatctcaaaaaaaaacctcgctggaatttctggaatctagccactttgtttccccctcatctcctctggccagtccaattccccaaaagcaacctgccaaaaaccaatttggccaaaaatcaatttgcccaaatggacaatttgtcacatgctattttcccacaggcgctctgcagtggctgccaaagttctatacacgtggtggatttctgtactttaggtccagaaaagacctaagggaaaaaactgcctggcatttaaaaataaatctattagaatcacttgtttattttgcttataaaatctttgcagaggaaagatctgtacaaaggcctacagattctttcctatcttaagcaagagttttgttttgttgtggttcagccaatttaacaagattgaggatgacagcaaattaattacacaacatcaatgatgagaaatgcagtctcatgcagcaaacctagcttacaactttacagaacagacaaaattctgcacaaaaaacattctacccaatgccatttcctataacaaacatgtacagtctcaagattgtggttataacctttagcaggtgattaggaaaccacagactacccggaaatcaactttcgtgacaagaattggagtaattagtaatcttacttccatagaaccttcacccacttggttagtgctctttaaggtaactgatttgtaaatatctttaatcttcattctttttctttcaacaaaggataaagtatgatctctttgtcttgaattttcaaaagctcttgtgtccacaacgagtttttcaaggtttattaaatacctttgtgccatgggactaagattttttcttttttttttttttttttttagacagagtctcactcttgtcgcccagactggagtgcagtggtgtgatcacagctcgctgcaacctctgcctcctgggctcaagtaatccacccctcagcctcccgagtatccaggactacaggcatgcatcaccatgtctggctaagttttttattttttgtagagatgagatctcactgtgttgcccaggggatctcaaactcctggattcaagcaatcctcctgccttggcctcctaaaatgctgggattacaggtgtgagccaccatacccagccgggactaagattttcattctttaattttaactaagatggaatcagtctttgggtttaaaataaattttattcctcaggaatatgaagttttgaaaatgagaatgttgttatgaaagggattgctgtctcccaacatatttgcaacccagtcctcgcctaaattcatgacctaatcaaatagatatttgaaatatctttcaaatctcagaccccttgcatgtcttgaggagtcagtgctattcaaagcagacaaaaggtttgtctctcacttatttgcacatgtctataacaggtgttgtcagttgccagaattttttttacaggagctgtgtatcttttatttttgcatatagcccaatttaaattaacacaatttaatttaacaatttaaattaacacaaataaaggagttagaaagcagggttgatgggaaaacctgtacctttgcttataaaattttgaatatttgagtatgctttgtctatgtcatgaaactaggcaaaatgggccttctgttgagccaacctgatagagcaattgtgaactgactgtaaaaaagttaaggggaaagaaaaacggggggcaaaaatactttcaggggctgttaaaaccttcctgtgcaacatgatgttgctataaacatttaaaaggacttggctgggcactgtggctcatgcctgtaatcccagcactttaggaggctgaggcaggaggatcacttgagcccagcagttcaagacaagtctgggcaacataaggagaccctgtctctaccaaaaaaaaaaaaaatcatatactacagtataataaacctccaatcatatactacagtataataaacctccaatcatatactacagtataataaacctccaatcatatactacagtataataaacctccaatcatatactacagtataataaacctccaatcatatactacagtataataaacctccaatcatatactacagtgtaataaacctccaatcatatactacagtgtaataaacctccaatcatatactacagtgtaataaatctccaatcatatactacagtgtaataaacctccaatcatatactacagtgtaataaacctccaatcatatactacagtgtaataaacctccaatcatatactacagtgtaataaacctccaatcatatactacagtgtaataaacctccaatcatatactacagtgtaataaacctccaatcatatactacagtgtaataaacctccaatcatatactaaagtgtaataaacctccaatcatatactacagtgtaataaacctccaatcatatactacagtgtaataaacctccaatcatatactacagtgtaataaacctccaatcatatactacagtgtaataaacctccaatcatatactacagtgtaataaacctccaatcatatattacagtataataaacccccaactacccatcactcagctttaacagtttgctttcacagaacaatgttttttaaatagtgggaaccaacccatcagacagacgttcatgaatcagtttcacgcagaggttctcattgtaattgtacactggcatgcctggggagctttaaaagagacttaagcccaggttttgcctttacaggttctaattcaattgatctggggttgggcctgagcactggggtttttaaaagcctcctagttgtcctgatgtgcagccaaggttgagaggatgagaagcacacacttcttcttttgtagttaactagagcagtacaggacagaaaagaacagaatgcatggcacagagtaaggcaatgtgaaacttctctttcgggaataggtgaatataatttcagattgaacacatgtatcaggtctcaatgtaaaaaggatttcctcggctgggtgtggtggcttacacctgtaatcccagcactttgggaggccgaggcaggtggatcacaaggtcaggagttggagaccagcctgtccaatatggtgaaaccctgtctctactaaaaatgcaaaaaaattagccgggcgtggtggcgcatgcctgtaatcccagctactcaggaggctgaggcaggagaattgcttgaacctgggaggcagagtttgcagtgaactgagatcatgccactgcactccagcctgggtgacagagcaagactgtatctcaaaaaaaaaaggatttcctaccatagattgcagtcagaaaagattaaaaaattactgcacaagaatataaacttcacaagggcaggggctggacatacggctcatgtctgtaatcccagcactatgggaggtcaaggtaggagggttgcttgaggccaggagttcgagaccagcctgggctggtctcaacaaaaaaattaaaaattggccggatgtggtggctcacacctatagttccagctacctgggaggctgaggtgggaggaccacttgaacccaggaggtcaaggctgcagtgagctatgatcatgccacagtactccaacctaggcaacagagggagaccttgtcaaaaaaaaaaaaaaatcccccccaaggccggggactgttttttttttttttactactgtatccccagagcctagaatactgcatgacacatagtaagaacgcaacaaatttgttgtagcaaagaggatgtgacaatcttaatctcgtgaggatgtagtatacactcaataaaatatgttgaataaatgaacaagtgaccaatccatatgttccctggcctttagtaggtgctcaataaatatttgttggataaatgcatgaatatccccagcacataggaggaatttgataaaattgtttggaaactaacgaggaactgaatctctatttctccctgctacatagttggtggtcaatatacaaatttgttggaaaaaactgaatgaataaatgacgctccaccacatttgacacatagcaggccctcaataatatttatattttatttttttatatttatttattttttgagacggagtttcactcttgttgcccaagctggagtgcagtggcatgatctaggctcactgcaacctctgccttccgggttcaagcaattctcctgcctcagcctcccaggtagctgggattacaggcacatgccaccacacctggctaattttgtattttttttagtagagacgggatttcaccatgttggccaggctggtctcaaactcctgacctcaagtgatccacccacctgggcctcccaaagtgctgggattacaggtgtgagccaccgctcccagcctattttaaaattatttatttatttatttatttatttttgagacggggtttccatcttgttgcccaggctggactgcaatggtgagatctccactcactgcaacctctgcctccggggttgaagcgattctcctgcctcagcctcccaagtagttaggattgcaggtgcccaccaccacacccagctaatttttgtatttttagtagagacggggtttcaccatgttggtcaggctggtctcaaactcctgacctcaggtgatctgcctgcctgggcctcccaaagtgctggaattacaggcgtgagccacccggccagtatttttagacaaatgaataaatgatcatccatctttctctgtcacatagtaagtacttgatagttattaaataaattgatgatgatatgctttctggcatacaataggaactcaacacatgagtattgcataaatgaataaatgacccactgttcatctcccctagcacatgggaggtgctggataaatgacttttcatctccccagatttccagaactacctacggacacagacagggaacacgaccactattaacatcatcatttgcactgtggactacctcctgcggctgcaggtgaggacgtgagacggttcaggtgtgacttgggtcgggggctgcagggccatggtcggccccagcaccccctcacaccctacccgcccccaccaggaatccatcagcgacttctactggtactactcgggcaaggatgtcattgaagagcagggcaagaggaacttctccaaagccatgtcggtggctaagcaggtgttcaacagcctcactgagtacatccaggtagggcgctccccctggggcgggagtgggaagggagggggtcccgcatcgtgatccctgatcccttctcggggattcccttcccccccacacggcactctgcctcccagggtccctgcaccgggaaccagcagagcctggcgcacagtcgcctatgggacgcagtggtgggattcctgcacgtgttcgcccacatgatgatgaagctcgctcaggttcgagcccctctggtctccatccacctgcttccgggcgtcccccaagtggtccatttccaagtcttgcccctttggtcagtttgtcacccgagtgctcccggcatgttccagactggttccctctcagtggccaaatccatcctctttctggattggctgtctgcatgaccccgcctcctcctctgcccctccctccccaccaatcagctggttttccatccacgcttccattggtctgacgtgttggccccgtcccaatggccggagctcctctatgattgattgctgtttttctctctgatgagtcatcgcagatgtggacagtccttgggctaggatggggctggtttctagattagagcctggggctgaggaaatgttttgcttctttatcttacttgcggcagatgacacccatatcaggcattcatgatgtaaggtccctgttgagcaccaccttccatttccataatccttgttcctctttccctcacccctttgcagccttgccaatgtctcacgaacacttaatccatttgctctgcttctgtctggtaactatattcaaggctgccatatactgttccgcaggtcgtgcactgcacaaaggcacgatctctgagagcattcacatcctacacataatggtgtatttattacaatagtttagttttccagcagatggcagtaaagcatccagcatgttataacttccctacaggaagtgttttaggggacgcctttttttctaatttgctcaaaggtgccccaggggctggcagaaaccctaattcgttgtcatctgactttttaaaaggagttaaacttagaatgcaattcctccgtgtcacagcagctgaagttgtgctgttggtatcctaaaattctagagagtgttggtatcatcatgtagaattccaaatcctgcagggctaattcatccgccaccatctagtctaggttgcaaaagctagaaatccagtgcaaagtggtggcttaagaaaaataaagaatttatcagttcatattacagatccagggcttagagtgatgtcagcagaactgcctcctctttgactgcatttgcaagcaggctgtctccctgggctggaaaaaatggtgcctcaggctcctatccactctacttcttaacagccctagagggaagagatctcctctttcctgaaagctccaagaaaaaaaaaaacctgagattctctctgactagcctattgggtcacatgtccctccctgaaccaatcatcataggcttaggaaagaaagctttgactgaccaggcccggtcatatacccacctatagaaccaggaggtagggttagccccatgtgctctgactgtgggatgggggactccgcaggtgaaaattgagggattgtaaagagaggagggggactgaatcatgggtaggcacaaaccacaggcgcccacccactgtaagatcttgagattaggagtgtcgggaccttaggcgcagaatgcagagctttggaactgtggaaatacattaggattggaatcaacaactgatagaactagcatgggagcaaaagatccttacatcccatttatctggtatcatctcctcccctctccattttatttggtggaaccatatgaaattaccactttggatctggcacggtggctcatacctgtaatcccagcactctgggagccctaggcgggcagatcacctgaggtcaggagttcgagaccagcctcaccaacatggagaaaccccatctctgttaaaagtaaaaaattagctgggtatggtggcgcatgcctgtaatccagctactcgagaggcttaggcaggggaattgcttgaacctgggaggcagaagttgcagtgagccgagattgcgccattacattccggcctgggcaacaagagcaaaactctgtctcaaaaagaaagaaattaccactttgtgagccaaaagtgatcacatgttggcaattttatgtgactcaacctaacataaataggggccatgaggcaaaactttgtattggaggtttctatgggccctacactgtggccctatgttccccgcagacggcttaccagaaagcacatggctgtctctgcagccttcctcctgaacccagagtcccactcttgccatcacacattatattcaacatacatctgtcaatcccaccgtaggccaggcacagtgctgggctcacatcccttcctagacctgggtctctgtccccagtgtttgtctctgtctgtctctgtctctctctgccccaaatgtctgccccgcaagcctctcagtcctccttgtctgccagccttcccactacccatcacctatcgagcccgtcccccaagtgccaaccccacccccacaatcttgtctctctgccccttcccctgcttccgaggaacatgtctggactcgggtcccctcggaggtaagaggggagaaaacgggtttaggccctgctgggtaggtgaggagggggagaagcaacagaggtgggggaggtgtatgctgagaccagccctcaccgagctgggatctctaggactcaagccagatcgagctgctgaaggagctgctggatctgcagaaggacatggtggtgatgttgctgtcgctactagaaggtaaacacccaggagtgagggtgagggaacagtaaagaggttcagagaagcctgagaatggccccctgagacccgggagaccctaatcctcaaccccatctgacatcgtgtcaggatccatgggttgatgaagaagccataataggccagatgcggtggctacacctgtaatcccagcactttgggaggccgaggtgggaagatcacctgaagtcaggagtttgagaccagcctgggcaacatggtgagaccctgtctctactaaaaatacaaaaattagcctagtgtggtggtgtgtgcctgtagacccagctactcgggaggctgaggtgggaggatcaccagagcccgggaggtccaggctgcagtgagctgtgatcacaccactgcactccagcctgggtgacagagcaagaccctgtctcaaaaaaacaaaccccaaaaacaaaccaaatgtccaaatgtggcaaaagataaacaattgatgaatgtggatatattaggatcccttttttttttttttcttttctgagacggagtctcgctctgccgctcaggctggaggtgcggtggcgcgatctcggctcactgcaagctccgcctcccaggttcacgccattctcctgcttggcctccccggtagctgggactacaggcgcccgccaccacacctggctaatttttttttttttttttttgtatttttagtagagacggggtttcaccatgttggtcaggatggtctggatctcctgacttcgtgatcctcccgcctcagcctcccaaagtgctgggattacagacttgagccactgcgcccagcctacattaaaatttaaaaattacaaaaataaactggagccaagcttcagctgctgcctttagagggagtgtgggatcgcagtttgccaatctctacctctccttgctgcttaccactggctagcctcagtcttctgtggaccctcctgactgtgtgtactggtggaagttttagttgtgtaagccctgaggtcatgcagctctgagttcaaatccattctccccactttactggctatgtaactttgagtgcatgactttctctatgtctcagtttctcttcctaaaagtagagtcacacacttccctttttgtgtgattgtgccagggtagcatttggcacctacctttagcgtacatcatcattatctttttttttttttttgagacagagtctcactccatcacccaggctggagtgcagtggcacgatctcggctctgcaacctccgcctcccaggttcaagcaattctcgtgcctcagcctcccaagtagctggaaatacaagcacatgccaccacgcccagctgattttgtatttttaatagagacggggtttcaccatgttggccaggctggtctcaaactcctggcctcaagtgatccacccacctcggtctcccaaagtgctgggattacaggcgtgagccaccacgtccgacctgacatcattagctttactgggggaggtgggcaaaggcaggatcagccaggttggcacaggaggctgacgcaggtcaggaagggacctgtggaggggaggctgtggctggccagggacactccagcagcgtggtggctcctgggctggaaagagaggcaagcctggtggggccccagaagggagtgttcaccggccacactgacctggggctgcctgcagggaacgtggtgaacggcatgatcgcccggcagatggtggacatgctcgtggaatcctcatccaatgtggagatgatcctcaagttcttcgacatgttcctgaaactcaaggacattgtgggctctgaagccttccaggactacgtaacggatccccgtggcctcatctccaagaaggacttccagaaggtgggtgtgggacatcgtgtgggcccaggacttgggtggggttgccaagggccagccatacccttctggctggctgcctcaggcaagagacatctctgcaagcctcactttccttgtttgtaaaatgaggataaaacagtccttgggttatatgtattctgttttatttcattttagagacaaggtctttctctgttgcccaggctggagtgcagtggcgtgatcatagctcactgcagccttgacctcctggcttaagcaatcctcccacctcagcctcctgagtagttgggacgacgggtgtgtgacatcatgcctggctaatttttaagtttattttttgtagagatgtggtctcactacattacccaggctcctcttgaactcttgggctccaacaattctcctaccttggcctcccaaagtgctgggattataggcatgagccacctcgctcagcccccttgggttattttgaggatgaaatgcattaacacagatgagaaccgttattactgttatctttattgatagtcataacattatcattattgtgaataggcatcagttattccatcaataaacattggctggctttcttctctgtgtagggcctgtagtgacactattgacgcatcaatgaccaagatagacacagcccgtgctttcatgggtttatagtctaatgggggaggcagtcactaactagaccattccaagtctaaataatgagcctgctaggagggaagtgctggaacatccttattcagaaacccactcctcctcctctaaccacctctcccatcctaactctccatcttttcttctgagcctcagtttcctactctgtaaaatggggataggataatcacattaaccactaactattggcagtgtgcggtggttcatgcctataatcccagcaatttgggaggccgaggtgggaggatcgcttgagcccaagagttcgagatcagcctgggcaacctagtgaaaccctgtatctataaaaataaaaataaaacaactattaactattgtgaggatgggcagtgcgggcagtacctggaatatggtgagtcctcaagagatgttagctgctattactactccctgatctttaatgttaccattttgttaactttttattttgaaataacttcaggtttatagagacgttgcaagaacagcacatagaatttctgaatacctttcacccacattgcccaaatgttttctatttactatttactccatcatgatttccctttcctttccttttttttttttttttttttttttgagacggagttttgctcttgttgcccaggctggagtgcagtggtgcaatctcagctcagtgcaacctccgcctcctgggttcaagcgattctcctgcctcagcctcctgagtagctgggattacaggcacgcaccaccatgcccagctaaatttgtgtgtgtgtgtgtgtgtgtgtgtgtgtgtgtgtgtgtgtgtgtgtgtgttgtatttttagtagagatgggatttcaccatgttggccaggctggtcttgaactcctggcctcaagtgatctgcctgcctcggcctcccaaagtgctgggattacaagcatgaaccacctcgcctagccaatttccctttactttgaaacacttcagcgtgtatctcctgagaacaaattcattctcctacctaagcacaggacaattatgctaatcaggaaattaacattggcacaatgctgctatctaatcctagaccttattcagtttcccttgttgaataaatttctttcgtcaatgtcttttctttgccaacccagaaccagggattgtatttaggtgttctgtctgttttcctccttcagtctggaactgtgcctgggtctgtctttatctttcctgacatgtttgaagaacgcaggcaaactgttttgtaaaatgtcgttcagtgtgggtttgtctgagttttcatcattatcagactagggttatgcatcttttgcaggaatatcagagaagtgatgtgtcctcagtgtaatgtattaggaggcacatgtggtttcatcccattactgtttattttcttatttatttgtttttagagtcagagtcttgctctattgccccggctggagtgcagtcaaacaatcctagctcactgcatccttgaccccctgggctcaggcgatcctcctgcctcagccacccaaagtgctgggattacaggtgtgagtcactgcacctggccaatgtctcttcccattactgttgttaacttggatggcttggttaactcggtgttcaccaggggctccacaatgaagttactgttattccctttggaatcaataagtgtctcatgaggatatactttgaggctatgtaaatattctgctaactctggggtcatcatccattgatgattcttgcctgaaacaattattcctctagtagctgacaaatggtggttttctcatttcgccgtatgctttaccatcactaggcaccattttactgtaagaaagagtgtttccttcttgtccatttcatttcattttctcattcatccattcatttatatcagtgtggattcacggctttttttttttttttttttttttttttttttttttttttgagacggagttttgctcttgttgcccaggctggagtgcaatggtatgatcttggctcactgcaacctccgcctcctgggttcagtgattcttctgcctcagcctcccaagtcgctgggattacaggtatgcaccaccatgcctggctaattttgtatttttagtagagacgggggtttcaccatgttggtcaggctggtctcgaactcccgacctcaagtgatggtcaggctggtttcaaattcccaacctcaagtgatccgcccgcctcagcctcccagagtgctgggattacaggtgtgagccactgcacctggcccatggcttcttagtctatgggttgcagctgtgactggccatctgcacttaggtaagctcagggttccctgagttaaaatcaaagtgccccatgccttccagttgtcccccaagagcctcactgtgtctctctgcttctcagccacgccttgcaagagtcatctgcccttgatcatctgttctcacctcccactccttccctgattcggggcttgccggcttccgtccctgtcaggctcctgaaactcctctgaccaagatcatcagtgacctctttacctctgactgtcccctctgacttgtcatcttggcagcctttgtcacagctggccttttcgtttccctccccaaccctgaggggcaatgcctgcttccctgaacctgagcctcacatccttcggaccctgcctcccagctgatccctcctagcctcttacccttcactgtgcctgagccctccaccttcatgaagagctcatagttaccatattctcactctgtgccctgcgtataaatgaatttgctcatttagtccttacagcaaccctacatggtaaaacatttttgttttgttttgcttctttgagacagggtcttgctttatcagtcagtctggagtgcagtggcgtgatcacaactcactgtagcctccacctcccaggctcaggtgatcctcctaccttagcctcccaagtaactgggactccaggtgtgtgccaccacacccggctacttttatttatttatttattttagagacggggtttgacatgttgccctagctggtcttgaactccaggactgaagcaatcagcccacctcaggctcccaaagtgctgggattaccagcataagctaccatgcccagcaggactgcttttttttttttgagatggaggagtctcactctgtcaccaggctggagtgcagtgatgtgatctcggctcactgcaaactccgcttcctgggttcaagcgattcttctgccttagcttcccgagtagctggactacaggcatgcgccaccacacccagctaatttttgtatttttagtagagacgggcttcaccatgttggccaaggtggtctcgatctcctgacctcatgatccacctgcctcggcctcccaaagtgctgggattacaggcgtgagccaccgcgcctggccaggattgctttttattcccattttatggatgtggaaactgaggcacagggagattaaacggacatgcttaaggtcacccatcttaataagtgacaaggttagggttagacctcaggcggtctggcctcagagtacactgccttcagattcatctgttaatctggtctaatcgatagtcagtgagcacttcctgggggctgggccctggctgggggtctcagccctactctcgagcctggcaggtttagggagagagtctggggtggctacaagagaagcaaaaagcatttgcaggagctaaagtacacatgattcacaattgaaaatgagtaatgatctctcctgactggggctgcacagatcacagggtttaatgtcacctacctgacattttacagctcaacatctgttacacaaagttataatctgcaactgggaaaagtgtattcattttattttttgaatatataattactcacgattttaaaaatcaaaatataggctgggcacagtggctcacgcctgtaatctcaacactttgggaggccaaggcaggcagatcacttgaggtcagaagttcaagaccagcctgggcaacatggcgaacctccccatctctactaaaaatacagaaattagccaagcatggtggcaggtgcctgtaatcccggctactcaggaggctaaggcaggagaatcccttgagcctgggaggcagagattgcagtgagctgagatcacgccactgcactccagcctgggtgacagagtgtgactccatatcaaaaaaaaaaaaaaaaaaatcaaaatatagccaggtgctgtggctcacaccagtaattccagcactttaggaggccaaggcaggaggattgcttgaggccaggagttcaagaccagcctggacaatatagcaagaccccattgctaaaaaaaaaaaaatcaaaaaattagctggatgtggaggtgtgcacctgtagtcccagctcctctggaggctgactgagctgggaggatcctttgagcccagaaggtcaaggctgcagtgaaccatgattgtaccactgcactccagcctgggcaacagagcacaagactttgtctcaaaaaaacatttatcaaaatacagcaaggcgtgaagtgagaagtcttactcctgctcttttccaatccactcttccccacatctaccatggtaaagccctttcgttagtttcttttgtatccttccatcattttttaaatgaaaatacaaacagatatttttgtttttctcgttttgtacataataggtataacatcactggtctgcattatttaataacatattctggagatataggaagtgtcgtcattcttttttacaggtgtccaatattccacgctgtgtgtatattatggtttatttgctattccttgttgatggacactggctttattcccaatgttttgctatacaacccatgttgcagtcagggctgtcatggatagttgcacccattgtgcactgcacaaggatgtcatttataccacagacattttacatttgtacatgttttactgcagagttccagcagatggagggaaatgtgctgaggaaggctgtagtatttgggcctaaagcaatgctggctataacaattactcttgctacactttgagaggctgaggcatgtggatcacctgaggtcaggagttcgagaccagcctgaccaacacggtgaaaccccatctctactaaaaatacgaaaaaatagcgggcatggtggcatgcacctgtaatcccagctgcttgggaggctgaggcagagaattgcttgaacccgggagttagaggttgcagtgagctgagattgcgccactgcactcctgcctgggcgacagaacaagactcagtctcaaaagaaaaaaaaaataagtagcattgttctataatttcccaagttcttcatggttgccagagttcttgacagtttacaaatcacatcttcattgatgaagtactttgtagatttcaaaacatctactatagcttggaaggccctttctggtgtttgaaatcacattttatttatttatttatttaaatgtttaattatattaacagagatgaggtctccctatgttgcccaggctggtcttgaactcctgggtttaagggatcctcctgcctcagcctcccaaagcgctgggattacaggaatgagtcacctcacccaacagaaaccacattttaggttactgatttattcctggtcagtaaacagtcttgaggttatcttcattgttttcctatctgcaaattttatttgtctcttaattaaaacacttcctttttaaagtgtctttactgaaatagaatgtacataccataaaatccacccatttaaaatgtacagttcagtggtttatagtgtgttcacagaattatgaagccatccctgcaatctaattttagaacattttaatcatcctttgaaaacgaaccccatacccattagcagtcatttcccacttcccccaccccagcccccggtaaccactgatctttctgcctctatagatttgcctattctgaacactgcatataaatggtatcataaaatatatatggtcttggccagacacggtgggtcacgcctgtaatcccagtactttgggaggtccaagagagtggactgtttgagtccaggtgtttgagaagagcctgggcaacatggcgaaaccctgtctccactaaaaatacaaaaaattagccgagtgtggtggcacatgcctgtagtcctagctacttgcgaggctgaggtgggaggaccgagaagttgaggtcgcagtgagtcctgaacacaccactgcactccactccagcctgagcaacagagtgagaccctgcctcaaaaaaaaaaaaaaaaaaatgcatgtgtgtgtgcgcacgtgtgtgtgtatgtgtgtgtggccttaaaagacgttccttttatttaacaaaccacaatgtcatcactcctaacccaaaataaaacagtacaaataaaaaagtcacagtcctttaaatcatcaaatatctagtgagtgtgcaaatttccaaatctcataactttcatgtaactatcaggattttttgtagcttctttaaatcagaatccaaacaagggccacccattgcaattggctgatactttttaaaatcatctttcatctcttgcttcccctctattatcttttctttttccttgcaatttatctcctggagatccagtcctgcagatctttactgtccaacagaaatacaatatgagcaatatgtatatttttaaattttcttcttttttttgagacagggtctcactctgttgtccaggctggagtgcagtggggcaatctcagctcactgtaacctccacctgtcaggttcaagtgattctcctgcctcagcctcctgagtagctgggattacaggcatgcgccaccacacctggctaatttttgtatttttagtagagacaaggtttcgccatgttggccagggtagtctcaaactcctggcctaaagtgatctgccctcctcaccctccgaaagtgctgggattacaggcgtgagtcaccataattttaaattttctaatagccatgttttttaaaaagtaaaaagaggaccggcatggtggctcgtgcctgtaatcccagcactttgggaggccaaggcgggaggatcacttgaggccaggagtttgagccagcctgcgtaacacagcaaaaccctatctctataaaaactttaaaaaataaccaggtgtagtagtgcatatctgtagtcccagttactggggaggctgaggcaggaggatctcttgaaccttggaggttaatgctgcagtgagccatgttcatggcactgtacttcaacctgggcaactgagcaagactctgttaaaaaaaaaaaaaagtaaaatgaaacactacacataatctagtacactcaggatattatttcaacatggaatcaatcctgtttatttatttatagagatggggtcttgccatgttgcccaggctggtctcaaactcctgtgctcaagcaatccaccctcctcagccacccaaggtgctgggattacaggcaagagccactgtgcctggccataatcaatctaaaaaatgattagctcgacatttttcattcttttttcacactaagtctatcagtggatagtgctgtcctagttgtagagcttcccatagtctggacctgaccaatgcgtccttgtggtgtcatttcatgtgttcctgtgtcccctgggtttcctccaaagtgggactcagccaaagttcgagcagattcagatttgggtgtaaggagttttttagccagaaccttcctatgtggggctactgtatacctccaccaggaggcacctcctttccagatgccagcagctgtttctgctcaacactcagacatattcattcattagagattgcaaaatggcgatagtctcatttcttttttttttttttttttttgtgacagagtctcattctgtcacccaggctggagtgcagtggcatgctctcggctcactgcaacctccgcctcccaggttcaagcgattctcctgcctcagcctcccaaagtgctgggattataggcatgagccacggcgcccagcctcttagttttcatgatgcttccttcacttgacaaatgagtatgagtacctactgtgtgtcaggcactgccctggtcctgaaggtacagcagtgaacaaaacagagagcccactgtgggggctgatagtccagtgggaaggggcagatgcaaataacgaaatacacgaagtaattgcaggttataatctgtggtctgaagggtgtgggagtgagcagggtgtggtaagccctgtaaaccggctggtggcggaaggccttctgcaggaggggacagcgaagctgagagttgaaagataccatatgactcagcgaggctgtggtgtcccaggcaaaggggacagtaaatggaaaggctgaaaaatgggaacaagagggacagagagcagcctgggcaacatggcgaaaccaaaccctgtccctacaaaaaatacaaaaattagctaggcatggtggcctatgcctgaagtcccagctacttgggaggctgaggcaagagaatcacttgaacccaggagggggaggttgctgtgagccaagatcgcgtcattgcactccagcctgggtgacaagagcgaaattctgtctcaaaaaaaagaaataaaaatacaaaaattagctaggcatggtggtgcatgcctgtattcccagctactcgggaggctgaggcaggagaatcgcttgaacccgggaggcggaggttgcagtgagccgagattgcaccactgcactccagcatgggcaacagagtgagactctctcaaaaataaaataaaataatacaataaaatataaaataaaataaaatactagccaggcacgatgactcatgcctgtaatctcgatactttgggaggctgaggtgggaggatcgcttgagcccaggagttcaagaccagcctagaaaacataatgagaccttgtctctacaaaaaaactgtttaaaaaattagctgggtatggtggtgcatgcctgtggtcccaacttggaaggctaagacgggaggatcacttgagcccaggaggtcgaggctatggcaagccatgatcactccattacactccagcctaggtagtagagacagactttgtctcaaaaaattaataataaagtaaaacaactaaaagactataagtagactgtaacacaaagaaaggataaatgccagagggaatggataacgcattaaccctgatgtgagtacgtattgcatgcctatatcaaaatagttcatctaccccataaataaatacaactactatgtacccacaaaaatgaaaaataaaaaggcctggctcatgcctgtaatcctaacactttgggaggccaaggcgggcagatcacttgagatcaggagttcaagaccagcctggccaacatggcgaaaccccatctctactaaaaatacaaaaattagcttggcgtggtagcacatgcctgtaatctcagctactcagaagactgaggcaggagaatcgcttgaaccctggaggcagaggtttcagtgagccaagatcacgccactgcactccagcctgggtgacagagcaagactctgtctcaaaaaataaaaataattttttaaaaaaatagtccaggtgtggtggctcacacctgtaatcctagcactttgggaggcccaggcaggcagatcacctgaggtcaggagttcaaggccagcctggccaacatggcgaaaccctgtctctactaaaaatacagaattagccagtgtggtggcacacgcctgtagtcccagctactcaggaggctgagacaggagaatcacttgaacccaggaggcggaggctgcagtgagccaagatcgtgccactgcactctagcctgggcaagacagagcaagactccgtctcaataagtaagtaagtaaataaataaataaagggatgggcaatgaatgatgacacagagagatcagcaaatcacaagagcaaagtctaggagtgaatggaggtgatagtgtcccaggcgcctgtggagaggtgggcttctttttttttttttttttttttttgagacagggtctcgctcttattgcccaggctaggtgcaatggcacaatcttggctcactgcaacatccgcctcccaggttcaagccattctcctgcttcagcctctcaagtagctgggattacaggcacgcaccatcatgcctaactaatttttgtatttttagtagagacggggtttcaccatgttgtccaggctggtctcgaactcctgacctcaggtgatccacccgcctcggcctcccaaagtcctgggattacaggcatgagccaccacacctggccagaggtggatttttgagacagacagtgtcacactgctcatgatagaggggtaggcaagcagacgaggtgagggcagaaggtgaggggttccggtgtgattatgtctccatgctctgtggtttctagagcccttcatgatttgcaaagcatgttactcatttagaaagcattttgcaaagttctggggtttttacaaagcacttttgagagccagaaaattttgcttctgttcataccccagagcaacatttctcacactgcatgttgctacccgtctggaggtaatgaaattaatttagcaatgcgtaactcgtgaccagcatctttagaaataaaatagaacactgcagagtgtgctacacagcaaaggtcagaattatgtcatgaaacctttttttttttttttgagtcacattgtaaaatgtattcttatggttgagtgagtgcggtcaagaacattttatgctgctctagagaacctcttgcaaaaatgcatgggcaatcagcacaagaatgttcaagaaaagtgttgtctgaaagaaatctgtgggtgaacttggtgatttatgcttgtaatcccaacactttgggaggcggaggagggcaaatcacctgagttcaggagtttgggacaagcctgggcaacatggcaaaaccccgtctacaaaaaaatacaaaaattcaccaggcacagtggcatgcacctgtagtcctagctactcaggaggctgaagcacgagactcatttgaccctgggaggtggaggctgcaatgagctgagatcgtgccactgcaccactccagcctgggtgaaagagtgagaccctgtctcagaaaaaaaaaacaaaaacaaaatacaaatctggaagcaacctacatttccattagcaggataacagataaagagtgttatggctgggcgcggtggcacacacctgtcacccctgcactttgggaggccgaggcgggtggatcacctgaggacaggagttcgagaccagcctggccaacatgatgaaaccctatctcactaaaaatacaaaaaattagccaggtgtggtggcgggcacctgtaatcccagctgctcaggaggctgaggcaggagaatcacttgaccctgggaggtggaggttgcagtgagctgagatcatgccactgcactccagcctgggcgacaagagcgaaactccgtctcaaaaaaaaaaaaaaaaaaaaagagaaagaaaaagaaaaaaaagcaagtttcagctgaggtgggaggatcccttgagcccaggagtttgagaccagccttggcaacatagggagaccttatctctacaaaaaaaaattaaaattaaaattagccaggtgtagcggtgtgtgcctgtagtcccagctgctctggatgctgggtacttgagcccgggggtggggatggggacgagaggggatgtcttgaggctgggttgagctgtgattgcgccactgcactccagcctgggcgacacagcgagaccttgtcttaaaaaaaaaaaaaaaaagagagagaattgaggctctccaggtcaccccactgacctccctgcccgcccccaggccatggacagccagaagcagttcagcggtccagaaatccagttcctgctttcgtgctccgaagcggatgagaacgaaatgatcaactgcgaagagttcgccaaccgcttccaggagccagcacgcgacatcggcttcaacgtggcggtgctgctgaccaacctgtcggagcatgtgccgcatgaccctcgcctgcacaacttcctggagctggccgagagcatccttgagtacttccgcccctacctgggccgcatcgagatcatgggcgcgtcacgccgcatcgagcgcatctacttcgagatctcagagaccaaccgcgcccagtgggagatgccccaggtcagggaacccgcgcgcgtgcaagctcgcctcctggggcttcgggcatgcgggtgctcacttcctgcaccctcagaccccacgggggctgtgcgtgcctcgcatatctgccctgctccggcaagcccacgcccacccttttgtacacatttcgtccagctgcgcccttgcacatccctggctcgcccctggccacttcttgcggacctggcccacacaaggatgcacaccccttgggcatgaagcagggtcagtgtgtcctgactgtggctgctcacacgccatgctttccccttacacccacaccctgggagctctggcaggcccttatagccctgatgcagccctacccacactctcacctcctcgaacctgcatggcgacacaccccttgctcaccttcccagtagcccccggcgtgccgtctcttggtcctggcccgctcatgctcactcttgtacacgctcgccttgggggctctggggtgccctggcatgctgacccacccttcaccagtcatcacgtttgcccccagatgccttctgaagtcctagcatatgtgtaccccaacttattctgggcccacacgtgggtgcacacctcttgcacacacaccctgaggatgccaatgagccctctcagaaccctggcatgcttcatttgttcactgtccacttgccctcactgtagccctggcacaaccatgctcacccatgcacacttgggccacggtctcaggctcacccagaagagccctcagacctactctctaatctgacatgccctatctcagctcctcctatgcccagcccacaaatgcttgaacatccctcacacactcgcttgccccaagggtacactcacgtggtcccggcatgtccccagcagagctggcacacctggctgacatatggttcccctccccattccctcacactccccacacgcccctgacacaccctcacctcattctcttgcacacacacttgcttgttgttcctcagatgccgccaggtacttgcacaccccttcttgtctcacacacatagcccgggaggtttgcgcacccgtcacctccttcatgagtgggcccttcatatgtctcctcaggggacaccagctcatgcacgcgggctcatgtcccacacagagccctgtcctcatgttctgggagccagtacacaaacccttggctccccttcccacattcatgcctgcctcacgcacactgcataactgcaggcccctctcacactcatactcctcctgtccccccacagagtcccaggcccttgcacacctgccccgtgtgcccacgtccaccgtgcacactgagcctctcgtggttgcacacttttggcatcttcccatgccgccacgccctccttactcctgatccctccctggcccccggtgtctcctcacatactccgcaggaacccttgagatcttgcacactcatctgtgcccctcggggccccactgcatacacacccccatctggcacacaagtggttgcagcatcctggcacccaggatgtccacacatccctgcctctgcaggaagcccctgttcaccacggcccttcccactcattctttgcacgtgctgggggagctctgccctcctctcttcctctgaccctgcgtgctccccatacaaacactctttgccttagtgctattcctccaaacacccgcttccttctgctcaccccttcccattccactttcccctgcttctcaggcatccacgtatgcccatgtggccttggagcacctgtggggcagtataataataggtaacactacggtgttgttgttgtttgagacagagtttcgctcttgttgaccaggctggagtgcaatggcacgatctcagctcactcaacctccacctcctgggttcaagcggttttcctgtctcagcctcctgagtagctgagattacagccatgtgcaaccatgcccacctaatttttatattttcagtagaggcggggttttgccatgttggcaaggctggtcttgaactcctgacctcaggtgatccgcccgcctcggcctcccaaagtgttgggattacaggtgtgcgccaccgtggcctgcccactatacagcatttatcaggcaccgggcgctgttctaatcatgcagcatctattaactcatttaaccctcacaccaaccctataatgtaggtcctattatgcccattttacagaggggaaaacggaggtccagagagttaattcaaaatcacccagctactcagtggcagaatcaggatttgaacccaggcaggctggctgcagagcctttgcctttaagcactatgctcctcctctcaaggaagctaaacacatccattctggagccagctctctgggggttcgaatcctatatgtgccaccttgtctgtgtcacctgggcatgtaactttctgggcctccctgtcctcatctataaaatgggaagaaaacccgctagccctaggcttgtttgtgaggattaaatgagttttatggaaactgcttgtatggggcctggccttattgaagcatttacaggagtacccacagtgagtgctctctataaagctctctctataggtttgctattgataatcaaaacaacaacttggccaggcgctgtggctcctgcctgtaatcccagcactttgggaggccaaggccagaggattgctcgaggccaggagttcgacaccagcctgaccaacacagacagaccctgtctctgcaaaaaaattttttttagaaattagcaggccagtcatggtggcttatgcctgtaatcccagcactttgggagggtgaggcgggcagatcacttgaggccaggagttccagatcagcctggccaacatggcaaaaccctgtctctactgaaaattcaaaaactcagcccagcatggtggcaggcgcctgtaatcccagctactcaggaggccgaggcatggggatcatgtgaaccctggggacgaaggttacagtgagacagcgtcacttcattccagcctaggagacagagctagatcttgtctttttttttttttttcttgagacagactttcactctgttgcccaggctggagtgcagtggcacgatcacagctcatggcaacctccgcctcccgggttcaagttattctcctacctcagcctcccgagtaacggattacaggggtgcgccaccacaccggctaatttttgcatttttagtagagacgggggtttcaccatgttggccaggctggtctcgaactcctgaccccaagtgatctgccagcctcagtttcccaaagtgctatgattacaggcggagccaccgcgcccagcctgaccctgtctcaaaaacaaaataccaacaatgcatttagaacagcgcctgccgcggtgaccccttgtagctgccactgcgctgtcgctgctgtccgagcccccgctgacggcgccctatcctgtctgccgcccctcgcttcaggtgaaggagtccaagcgccagttcatcttcgacgtggtgaacgagggcggcgaggctgagaagatggagctcttcgtgagtttctgcgaggacaccatcttcgagatgcagatcgccgcgcagatctcggagcccgagggcgagccggagaccgacgaggacgagggcgcgggcgcggcggaggcgggcgcggaaggcgcggaggagggcgcggcggggctcgagggcacggcggccacggcggcggcgggggcgacggcgcgggttgtggcggccgcaggccgggccctgcgaggcctcagctaccgcagcctgcggcggcgcgtgcggcggctgcggcggcttacggcccgcgaggcggccaccgcagtggcggcgctgctctgggcagcagtgacgcgcgctggggccgctggcgcgggggcggcggcgggcgcgctgggcctgctctggggctcgctgttcggcggcggcctggtggagggcgccaagaaggtgacggtgaccgagctcctggcaggcatgcccgaccccaccagcgacgaggtgcacggcgagcagccggccgggccgggcggagacgcagacggcgagggtgccagcgagggcgctggagacgccgcggagggcgctggagacgaggaggaggcggtgcacgaggccgggccgggcggtgccgacggggcggtggccgtgaccgatgggggccccttccggcccgaaggggctggcggtctcggggacatgggggacacgacgcctgcggaaccgcccacacccgagggctctcccatcctcaagaggaaattgggggtgagagagcaggcggggttttggggttttggaaagatgggggattggagggaggaagagagcccggctgggtggagacacacacagaggagagaactggctagggggatgggcacacgcacccacggaggacgcacccatggaggacgcacacggggacagcgggcgccgggcaagagagacgctcagagacagagggatactcagacccacagagaaagagactcagagatggagacctggagaaagggccggggagagagagtgcagggccggacagagtgcagggccggacagagtgcagggcccggagaggtagagaaaatgatacctgcagagccagagagagtaagaaacccagagaccaaattagagggcaggaaagaccaaaactaagccaggcgcggtggcttacacctgtgatcccagcactttgggaggccgaggcgggccgatcacctgaggtcaggagtttgagaccatcctggccaccgtggtggaaccccgtctctactaaaaatataaaaattagccgggcatggtggtgtgcgcctgtaatcccagctactcgggaggctgaggcaggagaatcgcttgaacccgggaggcagaggttgcagtgagccaagatggtgccactgcactccagcctgggcgacagagcgagactctgtctcaaaaaaaaaaaaaaaaaaaaaaaaaaaaaggaaaagaaagaccaagactaaaaaaagtcccgagacagggtcagggccactaggaaaagaccctcggagatactcgttgtgggaatgaagtacaccgtggaggaagggaccccaaacatcctcaggcccttggtgctgggaatgccttgggaatgtggaggtcaaggtggtgggaagccctggggacaagcagagctgcacttggagtcagcccgaccctgcgcagtgctttgggcaaagggcttcacctcgatgagcctcagtttcccctctgtaaaacgggaatcataatctgcctctttctggtggagggaagtgtaaaacttagattacccaggggaaataagagagaaaggagatgagaggagcaggcaggcagcctgagaagcgcttagggtgaggactcagccctgatgcttgccctgtccctaggtggatggagtggaggaggagctcccgccagagccagagcccgagccggaaccagagctggagccggagaaagccgagtgagtggccttggggctgaggggcctagcccctatcactgcctccctcctagagtaggagcctccagaggtcaggccccaaggctgtcctggccaccctgtgtcctcggcatcacccagcccagactcaggcacggaggaggggctctgagtaaaagaatcaagaaataaatgctccaacctgggcaacataaaaaaaaaattaaaattagccaagcatggtggtgtgtggggaggctgaggtgggaggatcacttgacccctggaggtggaggctgcagtgagccctgatcgcagcattgccctccagcctgggtgacagagcaagaccctgtgtcgaaaaagaaaaaaaaatatggagagatagaaaaatgaaaactcccatctaactgccaggccttcgcatgtgctttcccgctgcctggaacacaggcccccatgcctactctgagtctttctcatcctttccaattctccaggacacctgaccccctcctaagttgaggaggtgtctcctccagattcccacaaccccctgagcttcctccatcccagccccgaccactctgggctgtcactgcctggtgtcactgtcactgcctgtctcccacattggactggagccccataagggcaagtcctgattatctcatcatcccatgtacccagtaccatccaaacctgggccaggcacagggcgggcccttggtgaatggttttgaatgaatgaactcatgcattgcctgcccaggcacctcctgacctctctctgtcctgccctgcagtgccgagaatggggagaaggaagaagttcccgagcccacaccagagccccccaagaagcaagcacctccctcaccccctccaaagaaggaggaagctggaggcgaattctggggagaactggaggtgcagagggtgaagttcctggtaaggatccagccaggtcacctgaaccttcttctccccgggagccccacctctggtgcccacctctcctgctcaccttgttcttgagttcatctgttcaagctcgtctctaagaagaaccctagctggggaaagggcagaggtatccccagacctgcggacagggtagcattttcagatggccctcacttggttccttgtcccttccctgctcactatccttattccaacctccatacctctgttcatcggggccacccacccacacttccacctccatcctctgtccagagctacattcagtgaggccaccactctggccttcccaccgtggcctgttcttggctgtcagcccttacagtctcagtccctccaccactcccagtgctgctgtggaggtctgagctctcccaattcctggggaagcgttcatctcatccaggccaggaagaagggtgggtgttgggaggcaggtcccagggttccctccatcctgtctcccctccaggcctggcccgataggagggggtgagggaggctgggcacggtgggtcacacctgtaatcccagcaccttgggaggccgaggcaggcggatcgcctgaggtcaggagttcaagaccagactggccaacatggtgaaaccccatctctactaaaaatacaaaaaaaaaaaaaaaaaaaaattagccagccatagtggtgcatgcctgcaattccagctactcaggatgctgaggcatgagaatcgcttgaacccaagaggcagaagtttcagtgagccgagatcgtgccactgcactccagcctgggcgacagagtgagactctgcctcaaacaaagtggtggtggggggcgggggggcggtgagggaatcatgtggaacgaaggtggttccgtcagaatttgtgggaagaatgagggatggagggaaaggtggagagaaagagggagagatggaagatgttcctggccgtgcgagggggctcatgcctgtaagtccagtactttggaagtccaaggtaggaggatcactggagcccaggagtttggggcaagccagggcaacatagggagatccctgtctctacaaaagaattttttttttttttgagacggagtctcgctctgttgcccaggttggagtgcagtggcacaatctcggctcactgcaagctctgactcctgggttcacgccattctcctgcctcagcctcccgagtagctaggactacaggcgcccgccgccacgcctggctaattttttgtatttttagtagaaacggggtttcaccgtgttagccagaatggcctagatctgaccttgtgatccacccgccttggcctcccaaagtgctgggattacaggcgtgagccactgcacctggccgaatatttttaatctttttttttttttaattactgctccttgcagagcagggctaccctctaggcagtgcacccagagtagccaaaaatgtttttttaattagctgggtgaggtgacacatgcctgtggtcccagctgttcaggaggctgaggcgggaggatcacttaagcacaggaggttgaggcagcagtgagctatggttgtgtcacttcactccaacctgggtgagagtaagaccttgactcaaaaaaaaaaaaaattccctttcatcttctgtaaagcaggcagggcgacaggtggggtgacctcactcaggaagcagcatggccaagtggcttggagcttggactctggaggctgactgcccgggttcaaatcccatctctgccactcgttggttatgttaccttgagcaagacaccacttccctgagcctcagtttcctcatctgtaaagtgcgcataacagtagtgcccacttcacaggggtgtactgagaattaaacaagctcatgcaaataaagttcttagcccagatgttggtataagcaagcactcaacaaataggaggttgaggccagccgaggtggctcacacctataatcctagcactttgggaggctgaggtgggtggatcacctgaggtcaggagtttgagaccagcctgaccaacatggtgagaccccgtctctactgaaaatacaaaaactaactgagtgtggtggtgcatacctgtaatcccagctacttaggaggctgagtcatgagaatttgaacccggtaggcagaggttgcagtgagccgagatggcgccactgcattcgagcctgggtgacagagtgagaccttgtctcaaaaataaataaataggctggacgtggtggctcaagcctgtaatcccagcacttaggctgaggagggcggatcacgaggtcaggagtttgagatcagcctggccaatatggtgaaaccctgtctctactaaaaatacacaaattagctgggcgtggtggcacacgcctgtagtcccagctactcgggaggcggcagcagaggaattgcttgaacccgggcggcagaggttgcagtgagccaagatcgcaccactgcactccagcctggacgacagagcaagactctgtctcaaaaataataataataataattaataaataaataggaggttgtaggaaagatattgagagcccaggtactttgattgcaggtaaatgatgggatgaattctccagggaagaggctgatctgtgagcgctttctctctttttctcttctctctcagaactacctgtcccggaacttttacaccctgcggttccttgccctcttcttggcatttgccatcaacttcatcttgctgttttataaggtgctggtcctgaagggctgggagggtcaggcccttttccatgctgtgggatgggaggctcagcccctatcagaatttcagggttcctccactgaagggataaggtattgggctttgggtcgttaggagggttcaggctggacacctggatcctgggacccccctccatgggggtgagtaggggatatctggatccatctgggacagaagcctgagtgtctgtgggagttagagcaggagcaggagctgagttctctgctcagctcggccacatgccagtcctgtgcgcctgggtgcaggccctcagctcttggcaacacccactgattctgttaagcatctttggtttcacataagctaaacagaagtttgcagggaggaagaaatgggccactcacagaatggaaggaatgggttaagaaccaggcctcctgaaggacaaagggacccttggggtcttgccaggggtctagataacaggacagtaaggtagactagagagatcgaagcatggcttctgtgggacccagaagtcccacagtgggactgcccactggcgcatgacgataggcaaggtgcttaccatccctgtgcctcaactccctcatctgtaaaatggaatacctcttagagctgtggggattgaaagaggataaggcaccaggcacagtggctcacgcctgtaatcccagcactttgggaggccgaggtaggtggattacctgaagtccggaattcaagaccagcctggccacatggtgaaaccccgtctctactaaaaatacaaaaaaaaattagccaggcctggtggcgggcacctgtaatccaagctatgcaggaggctgaggcagtagaatcccttgaacccaggaggcaaaggttgcagtgagccgagattgcaccactacactccagcctaggtgacaagagtgaaactccgtccaccccaccaaaaaaaagaggatgagtgtgtgtaaggcagttagagcaacagtacctggcatataaaaagcactgtgtaaatgtttagctgctactaattttcatgttagtgttaatattagtgggcagtctctttagggctccactatcaagatgaaccaactctgtcttcagttctgtgccactcagttcaataggctaattcccaggtcagagtctgatttgctagctacagccctaggcccaacccttgatcttgattgacagccacaccaagactgtatctggtatggtcccagtccaatctcgggaatggaggctcaattttgtgagtgggctctgcatgtggcagacccacagatgaatctctgtccccatttcaggtctcagactctccaccaggggaggacgacatggaaggctcagctgctggggatgtgtcaggtgcaggctctggtggcagctctggctggggcttgggggccggagaggaggcagagggcgatgaggatgagaacatggtgtactacttcctggaggaaagcacaggctacatggaacccgccctgcggtgtctgagcctcctgcatacactggtggcctttctctgcatcattggctataattgtctcaaggtgggcccatggccatggttctggggcaagggcttattggctgggtgggggtgggggcagtgctggagcactggctggggctgggggccctcaaagtggttgggacagagggggcctagggttggggtgagggctggggaactgggtacaggattggggtctccagcaaggatgacaggggtctccagtaaggacgacattcagattgggaacggacacggcttatagctgaggaaccaggttctggaccactgtcttgatactttgctattgaactagagttctttgggcttaaaactttcatacatgctattccctctgcctgcaatactttgccctgcttccacctccttgcacctgcctgttttattcatccttcagttctgagttcagacctccctcccttgggaagccccaggtggcatcaggcaccactcctgggctcccacagctcccctgttctcacatcctggcccgatccctctgcctgtgccccacccccattccagccctgacccctatatgcccctacatcccagccctgacacccctgcctgtgcctctccactgccagccccgactgctctgcctgtgccccccaattccagccctgactcttctatctatgccccctatcccggccctgacccctctatctatgcaccacattccagccctgacccccctgcctgtgcctcccccatccctgccctgacccctctgcccatgttccccacatcccagccctaagccctctgcctgggcctcatttctacccttatcactgggaaagcacttctgatgtggggtcacacacagaccccagcaagatgtcatggcttctgctgagactatggtccagccaaggtgcctgacgcccacctttggcctcctcccactatccaggtgcccctggtaatctttaagcgggagaaggagctggcccggaagctggagtttgatggcctgtacatcacggagcagcctgaggacgatgacgtgaaggggcagtgggaccgactggtgctcaacacgccgtaaggacccagcccccacctcagggtggcagcaggaggggacctgggtttccacccagtccaggcctggaccccaaaaaactagggtttcggtccgggcacggtggctcacacctgtaatcccggcactttgggaggctaaggcgggcggatcacgaggtcaggagtttgagaccagcctggacaacatggtgaaatcccgtctctactaaaagtacaaaaattagctgggcgtggtggcgggcgcctgtaatcccagctactgggaaggctgaatcagaagaatcacttgaacctgggatgtggaggatgcagtgagccgagatcgcaccattacactccagcctgggcaacaagagtgaaattccacccccttccccccagacaaaaaaaaaaaaacctagggtttcagtccctgcaggccctgcctcattctccccaagtcttactctttctttccataaaagaggcacatttcccatgcattacagcatctgtgtgggtgaggttggcacacagagattcctagacttgaggcctggaggttcctgttcagtgactctggggtgtgagcccaggaacccgtgttttaaaccctgtctccaggtgtgattcttactcaggtgcaatgagtgcaaaataaaaaaacatggccaggcacgatggctcatgcctgtaatcccaacacttgggaggccaaggtggcagatcacttgaggtcaggagttcgagaccagcctagccaacatggtgaaaccccatctctactaaaaatacaaaaattagtctctactaaaaatacaaaaagtaggcatggtggtgggtgcctgtggtcctagctactccggaggctgaggcatgagaatcacttaaacctgcgaggtggaggttgcagtgagccgagattgtgcctctgcactccagcctgggcaacagagcgagactccatctgaaaaaaaaaaaaaaaaggaaaagaaaaagaaaggaaaaaaaaaaaagaaagaaaagaaatcattaggggccctaggggccgcactcagtggctcacgcctgtaatctcagcactttgggaggctgaggcaggaggatcccttgtgcccaggagttcaagaccagcctggacaacatagagagacctatatctttagaaaaaaaaaactaaaaagttagccagacatgctagcctggctagcgcatgcctgtagtcttagctgtttgggaggctgaggctggaggatggcgtgagcccaggagttctaggctgcagtgagctatgattatgccactgtccttcagcctgagtgacagagcaagaccctatgtctgggggccaaaaaaaaaacaagtaggaattggaagtgcaatgaatcaaagcacttcaaataattgcaaatccgtgaattcataatcaatcatcgctccaccctctcaaaaaacaaaactcgtggctgggcacagtggctcacatctgtaatcaatcctagcactttgggaggccgaggcaggcggatcacgaggtcaggagatccagaccatcctggctaacatggtgaaaccctgtctctactaaaaatacaaaaaaattagctgggcgtggcagtgggtgcctgtagtcacagctactcgggaggctgaggcagaagaatggcgtgaaccgaggaggcggagcttgcagtgagcccagatggcaccactgcactccagcctgggcgacagagcgagactccgtctcaaaaaaaaaaaaaaaaaactcgttggccatatttgaggatgttagggcatcaatttgtcacttggaaaactggtgaataaagggccagaatcatgaaattaaatgaaatcaaccagtatgaggaagcaggcagttgcactggagttggtgctgagttaggctgctgttttggactcctccccacccatcaccacgccagagcctctttatcagagtgccattctgaggtcttttttgcacatctggctctgaatgcaaattctctgcctcatttggggtctagcaaagatggcagtggggtccccactgttcaaggttcctacaagaaaagcagtggagccaggcgcaggtggctcacgcctgtaatcccagcactttgggaggccaaggcgggaggggggatcacctgaggtcagaagtttgagaccagcctggccaacatggcaaaaccctgtctctactaaaaatacaaaaattagccgggcgtggtggtgggcgcctgtaatcccagcactttgggaggccaaggcgggtgggggcatcacctgaggtcagaagttcaagaacagcctggccaacatggcaaaacctcgtctctactaaaaatacgaaaattagccgggcgtggtggtgggcgcctgtaatcccagctactcaggaggctgaggcaggagaatcgcttgaacctgggaggcaaagtttgcagtgagcagatatcacaccactgcactccagcctgggcaacagagtgagactccatctcaaaaaaaaaggaaaaagaaaaacagtggagtttcagccaaccctgtcgtggctgacagctctgatccctctggccctaacatcttatactcacgctttctctctctctctctgcaggtctttccctagcaactactgggacaagtttgtcaagcgcaaggtgagaggacatggatgccctgggtcctggattgggtccctgcctgccaccaggccatcacaggcctgccaagcacttgcttggtgtgtgaccttgggcaagaggtttttttgcctttctgagtagcacctcagtttccccatggggagatgggcatagtaagcttgcttccctttcttgaatgggcacatggaaagagcagagcatcaaggccaagcgtggtggctcacgcctgtaatcccagaactttgggaggctgagatggatgtaacacttgagctcaggaatttcacagcagcctgggcaacatggcaaaatgccgtctctaccaaaaatacaaaaaattagcacggtaccgcatgcctgtagtcccagctactcaggaggctgaggtgggaggatcgcttaacctgggaggcagaagttgcagtgagccaagattgcaccactgcactacagcctgggtgaaagagtgagacctcatctcaaaaaaaataataataacaaaaaataagaaagcatagcatagtgcctggcacagagtgaatactcaagaaatactggttgaggccaggagcagtggcacacgcctgtaatcccagcactttgggaggccgaggtgggcagatcacttgaggtcaggagtttgagaccagcctggacaacatggcaaaactgcatctctactaaaaacacaaaaattagctgggcacctgtaatcccagctacttgagagactgaggcaggagaatcacttgaacccgggcggcagaggctgcagtgagccgagatcgcgccattgcattccagcctgggtgacagagcgagactccgtctcaaaaaaagagagaaatactagttgaaagagaggaagttagcaatatgtcttaagcacacacactctggaaccagattgcctgcttttcttttgtttttttctttgagacggagtctcgctctgttacccagtctggagtgcagtggcacaatctcagctcactgcaacctccacctcccgggttcaagcgattctcctgcctcagcctcccgagtagctgggattacaggcacccaccaccacgtctggctaatttttgtatttttagtagagacggggtttcgccatgtgggccaggctgatctcgaactcctgacctcaggtgatccacccgcctcggcctcccaaagtgctgggattacaggcacgagccaccgcgcccagccgattgcctgcctttctatttctggcttattgacctttctgtacctcatactcaaagtggggtaataatacggccaaccctacagggttgttgtattatgtactacatgagcagtatctggcatataggagaacactagatatgttggctgttactataattcgttcactcatatttacggagcacctattatgtgccaggaacagttttagaaacctgggatcccgtgttaaacaaaacagtgattctgaccttcaagttggaaagatagatgatgaacccaagtacagtatgtcagtggtgataaatgctgtagaaaaaaacaaagtgggctgggcacggtggctcacgcctgtaatcccagcactttgggaggccaaggagggcagatcacttgaggttaggagttcaagaccagcctgaccaacacagagaaaccccgtccctactaaaaatacaaaattagccgggcatggtggtgcatgcctgtaatcccagctactcaggtggctgaggcaggagaatcgcttgaacccgggaggcacaggttgcagtgagcagagatggcgccactgccctccagcctgggtgacagagggagactgtctcaaaaaaaaaaatgcacctcccatttctcactcagagtttggagtgtccccagaacccccttgcaggccacgacacacacccacactccagctgtgtctacacagcctgatgctctcttgtgcaggtcctggacaaacatggggacatctacgggcgggagcggattgctgagctactgggcatggacctggccacactagagatcacagcccacaatgagcgcaagcccaacccgccgccagggctgctgacctggtgagcccaggacacccctgcacaggcctggggcatgcaggggaggtgactggagtctgacactcaagcatctctccccacccccgcccccacaggctcatgtccatcgatgtcaagtaccagatctggaagttcggggtcatcttcacagacaacgtgagcaggggcccacagactggggagggactctgcaggggtggggcgttaggagggttcccaacgtcgggtgttcctgaccaaagaatgactcctgggaccctgagtggctgtgaccctagggtatcttcttatccacacaaggctccttatccccctagacatcttattagtattattattactatttttttttaaatagctgggattgggtgtggtggctcacgcctgtactcccaacactttgagaagccaaggctggtggatcactggagcccagagtttgagaccagcctgggcaatatagtgagatcctctctctacagaaaatttaaaaattagctggggctgggcgtgctggcttacgcctgtagtcccagcactttgggaggccgaggcaggcagatcacttgaggtcaggagttcaagacaaacctggcactgggcatggcagcaggtgcctgtaatcccagctactcaggaggctgaggcaggagaatggcttgaatccaggaggtggaggctgcagtgagccaagatcgcaccactgcactccagcctgggcgacagaatgagaatccatctcaacaacaacaacaacaaaaacacaaaaaattagccaggcagacaggcacagtggctcaggcctataatcccagcactttgggaggcggaggcagaggtttgcttgagctcaaacgtttaagaccagcttgggcaacttttgtagagacggtgaaaccctgtctctacaaacaatacaaaaattagccaggcgtggtggtgcacacctgtagtcccagccactcaacaagctgcggtgggaggatggcttgagcccaggaggcagaggtttcagtgagctgcatgtgcaccactgcactccagcgtggataacagagcgagaccctgtctctaacaaaaaacagagagtggccaggtgcggtggctcaggcctgtaatcccagcactttgggttgggaggccgaggtgggtggatcacttgaggccaggagttagagaccagcctggccatcatggtgaaacccatctctactaaaaatacaaaaattagctgggtgtggtgacccacgcctgtggtcccagctactttggaggctaaggcaggagaatcgcttgaacccgggaggcggaggttgcagtgagctgagattgcaacactgcactccagcctgggcaacagactaagactccatctcaaaaaaaaaaaaaaaaaaattagctgggtgtggttacccacacctgtggtctcagctacttggcaggcttagcctccttcacttgaacctgagaggcggaggttgcagtgagctgagattgcgccatagcattccagcctgggtgacaagtgtgaaactccatctcaaaaaaaaaaaaaaaaaaagacagaggaagagatgatggagtctcgctatgttgcccagactggtcttcaactcctgacctcaagtgatgctcctgcctcagccccccaaagcactggggatacaggcatgagccaccacacccggcccagaacatcctttggctccctcagtgtgcccttagattgccagattatttccttctggagggggctctcatctccccgcaggatgccttctcacccggaatgccctgatcctccatgtactccccaaacagagctggcacccgacccccagggcacagctgactctcgagtggcccctaccctccagagtgctcctcgtgtgtccctgccttccccctgacccctggccctgtgtgcccacagtccttcctgtacctgggctggtatatggtgatgtccctcttgggacactacaacaacttcttctttgctgcccatctcctggacatcgccatgggggtcaagacgctgcgcaccatcctgtcctctgtcacccacaatgggaaacaggtgtggggaggacctggctgtggggcgtgggccagcagggaccagcgtggcagtgggtggtgaagggataagggccgggcagctgggctgaggaggggcaaggccaggtgcgctgagccgggggtgtgtggggcagcaaggtagagccacagggactgaaccggggccaggacccagcatgggcagggtggggggagggcaagcccagggcggagctgacctggccccatcctgcccccagctggtgatgaccgtgggccttctggcggtggtcgtctacctgtacaccgtggtggccttcaacttcttccgcaagttctacaacaagagcgaggatgaggatgaacctgacatgaagtgtgatgacatgatgacggtgagcccctcccctagcactctgggacccttccttctcgcatctgttgaaggagttaataatggtacctccaggccgggcgtggtgcctccagcctgcaatcccagtgcgtcgggaggccgaggcgggacgattacttgagtccaggagttggaaaccagcctgggcaacaaagcaaaaatcctgtctctataaaaaaaaatttaaacgttagctgggtgttgtgttgtgtgcctggaggctaaggcaagaggatcacttggtcccagcagtttgaggctttagtgagctacgaatgggccactacactccatcctggcagacagacagagaccctatctctaaaaaatgaaaatagtacctacagtttggcaagctgatgcatgccaggcacattttttttttttttttttgagatggagtctcactgtgttgccaggctagagtgcagtggcgcaatctcagctcactgcaacctccgcttcctgggttcaagtgattctcctgcctcagcctcccaagtagctgggactacaggcgcatgccaccacacccagatactttttgtattcttaattttctttctttcttttttttttgagacagagtctggcccaggctggagtgcagtggcgtgatctcagctcactgcaagctccgcctcccgggttcatgccattctcctgcctctgcctcccgagtagctgggacaacaggcgcccgccaccacgcctggcaaattttttgtatttttagtagagccggggtttcaccatgttagccaggatggtctcgatctcctgacctggtgatccgcccgcctgggcctcccaaagtgctgggattacaggcatgagccactgcgcccggccaatttttgtattcttagtagagacggagtttcaccatgttggccaggatggtctccatctctgcctgtgccgtcgtgatctgcccacctcggcctcccaaagtgctgggattacaggtgtgagccgccgcacctggccatgtcagatactttgaacagtgccaggcatatgagtgctccacacctcttcgccattgtttcaatattatttgagctgaggttttttgttgttgttgttcctgagacagagtctcgttctgtcacccaggctggagtgcagtgacatgacctcagcttactgcaacctctgtctctcaggttcaagtgattctcctgcgttagcctcctgagtagctgggattacaggcgcacactaccacacccagctgatttttgtatttttagtagagatggaggtgggggggtctcacaatgttggccaggcttgtctcgaactcctgacctcaaatgatccacccacctcggcctcccaaagtgctgggattacagatgtgagcaactgcacccggccttatttgagcttttcaaactattattattggaaaggtactcagggagcgtgcccctgccacttatgagccgtgtgattttggggcaggctactcaacctcctccctatgccctgggggcctcacctgtaaaatgagtgtgtaatagtagttgcttttaggactaataggtgctccctggctatcgaagacttaaaagacttagaccattgccttgcacggtggctcatgcctgtaatcccagcactttggggggctgaggggggcagattacctgaggttgggagtttgagaccggcctgaccaacatggagaaaccccatatctactaaaaatacaaaattagctgggcatggtggcgcatgcctgtaatcccagctactcgggaggctgagacaggagaatcacttgaacccgggaggtggaggttgccatgagccgagattgcgccactgcactccagcctaggcaacgagagtgaaactccgtctcaaaaaaaaggaaaaaaaaaaagacttagactagtgcctggcacatcctcaggattatatagatgttagcttctatcatcattatccacaattaaaagtttcacccaggccgggcgcagtgactcacgcctgtaatcccaacactgtgggaggctgaggcaagaggattgcttgagcttaggagtttgaggttgcagtgtgctatgactgcgccactgcactccagcctgggtaacacattgagactctgtgtcaagtttaaaaaaaagtttcacccaaggtatacccagcgttcaatgcacatttatattttctcttctattctaataatggtgatcataacccaaattgatgcgaacttactagagacacaggccacaatccacaattaaaagaatcatttctggggtttatctccaaagatgtcctgcagtctggctccgtgggttcctccctgctctcaggacaaagtccagctcctcaacctgacatctgaggctcttccagacacggcctcgctgcccacagcctcgttctcattatagtcacttatcttagtttttactctaggatgactgtgttctctcacatcctggggacacggaaagaacaagtgtatgccgggcgctgtggctcacgcttttaatcccagcattttgggaggccaaggcaggtggatcatctgaggtcaagagtttgagaccagtctggccaacgtggtgaaaccctgtctccactaaaaatacaaaaattagtgggatgtggtggtgggcgcctataatcccagctacctgggaggctgaggcaggagaatctcttgaaccccggaggcggaggttgcagtgagccgagatcacgccattgcactccagcctgggcaacaagagcaaaactccatctcaaaaaaaaaaaaaaaagaaaaaagtacaaaaattagctgggtggggtgacacgcacctgtattcccgactactcaggaggctgaggcaggagaatctcttgaactcggtggtggaggtcgcagtgagccaatattgcaccacagcactccagcctgggcaacagagcaagactctgtctcaaaaaaaaaaaaaaacatatgtaaagttgttcccaaatgccaggtagaccatgctccctccccacccccactcagacccttcttgtggctccccagcccactgtagataaagtcgaatcaccctgccgtggcttacaaagcctgggaagggctggccctgcctgggtctaaccgcaaaccctcttgctttttgctttctagccgcctggtcctctttcagttcccctaggactgtgtgttttctcccaattcaagccctttgcacctgatgttctctctgtcccctaccccaggcctgacatacacacacaccccattcacttgatacctcacctttccacttaaatgccacatcctacaggaagccccttgaccgcgggctgggccagggcccacagagccacatgcccaggccctgcctcatctctccctgctctcctgcacaggagctctattttccagcctcacccaaccattttcagttcctcacagcagcaggatgtactctttcctcactgatggcgaggcagcatgtggccttctctgctgggaacactctcccaccacccctccacctaaggcctcctttaggtttcagctcacacctgcctcctcttccaggaagcctcacctgatcacctaggctggatcagatgcctccagcgggctgttaaagcttccagtgcttcccctagctcatccctggtcacactgtgcctccccaccccagcctcgaccctctgcctgtgcccctcccatcctcgccctcacccttctgcctgtgcccccctatcctggccctgatccctacacctgtgcccccccccacccatcccggccctcatccctccgtctgtgccccccatccatcccggccctgacccctctgcctgtgccccactatcctggccctaacctctcagcctgtaccctccatcctggccctgacccctctgcctgtgccccccacccaacctggccctgacccttctgcctgtaccccccattccagccctgacccctctgcctgtgcccccccatgctagccctgacccctctccctgtgcccccctatcctggccctgacccctctgcctgtgccccccttatcctggccctgattcccctgccagtgccccccatcccagccctgacccctctgcctgtgccccccttatcctggccctgacccctctgcctgtgccccccatcctggccctgacccctctgcctgcgccccacacccaacctggccctcacccccctgcccgtgctgttcctgtcacagccctgaccatttctggctgttggtccctgtctgatgccgtatctgtgagccctttgagggcagggcccagggctgtctcagtcgttaccatgtcttcagccctgcctatcccggggccttggctggtactcagtgaatgtcgaatgaatgagtgaccagtgtgctcccctccctcagtgttacctgtttcacatgtacgtgggtgtccgggctggcggaggcattggggacgagatcgaggaccccgcgggtgacgaatacgagctctacagggtggtcttcgacatcaccttcttcttcttcgtcatcgtcatcctgttggccatcatccagggtcagtgctgggagtgggcgctcagggcccggaggcaggctagctccatggctaagaatgcaggcccaggatccagtcggcctgcattcataccccatctctacctctcgctactgtgagaccttgggcaagtcacctctcggggcctccgtttctccatctgcaaaacgagggtgtcaatggtactaacctcataggttgtgatcaggattaagtcagttcataggcgctcggtgtctggctcatatgagtgctcaataaaggcctgagatatatatatatatatatgtttatttatatatatatgtgtttatatatatttatatatgtgtttatatatatttatatatatgtgtgtgtgtctatatatatatatgtataattttttttttgagagggagtctcgctctgttgcccgggccagagttcagtggtgcaatcttggctcactgcaacctctacctcccaggttcaagcgattcttctgcctcagcctcctgattagctgggactacaggcacatgctaccacacccagctaattttttttatttttttattgttagtagtgagggggtttcaccatgttggccaggctgctcttgaactcctcacctcagatgatccgcccacctcagcctcccaaagtactgggattacaggcgtgagccaccgcacccggccaataaaggcctaatactatcttcttaggaagcgagattaggggtgagattagggaaatgggggatggagggcaagccctggaggtaggtagctggagaggggggagtctgaaccaggtcagaggtcgggcactgacttgtgtcctgccaccccaggtctgatcatcgacgcttttggtgagctccgagaccaacaagagcaagtgaaggaggatatggaggtaggtcatgtctgggggtgacccagagggattacgggattcagggggtcaagtgggcctccactctgatgtctcttgccactcacagaccaagtgcttcatctgtggaatcggcagtgactactttgatacgacaccgcatggcttcgagactcacacgctggaggagcacaacctggccaattacatgtgagcagacacactggccagtcaggagggtggggggcatggctgccaatagccagcagtggggtacttagctttggccagttaggaaagggggtgtagtgtccatgtgggcagattccctgccagccaatcagaaggtaagggtggggccccgcaagatggttcacacctgtaagcccagcactttgggaggccaagtggggaggattacttgaggccaggagttcgagaccagcttgggcaacatagcaagacttcctctctactataaatgaaaaataaaataaggtaagggtggttctgacttgtctcctgtggtcctctcaccctcaggtttttcctgatgtatttgataaacaaggatgagacagaacacacgggtcaggtaagggggtgttaatgggaggacagtgggcaggacgtggagccctttaacataaggccagtcagtaggtggcagtaaaaagctcctatcaatatcaagggttagggctgggggctgggcacggcggctcacgcctgtaatcccaacactttgggaggccaaggcgggtggattacttgaggtcaggagttcaagaccagcctggccagcatggtgaaattcagtctctactaaaaatgcaaagattagcagggcgtggttgtgcatgcctgtaatcccagctacttggaaagctgaggtgggagaatcgcttgaacccaggaggcagaagttgcagtgagccaagatcatgccactgtactccagcctaggtgacagagcgatactccatctcaaaaaaaatgggtttgggctgggcgtcctggctcacgcctgcaatcctagcacttcgggaggccacagcgggagaattgcttgagaccagaagttcaagacagcctaggaacacagcgagaccctttctctattaaaaaattagccaggggtggtggtgtgcacctgtagtcccagctactctggagactgaggtggagaatcgcttgagccaggaggctgtagtgagctgtgattgtcgccactgcactccagcctgggcaacagagcaacaccctgtctaaaaatatatatatatatatgtctcaagggtttgaagatgtgaccaatgaactctttctatccccaatcctaggagtcttatgtctggaagatgtaccaagagagatgttgggatttcttcccagctggtgattgtttccgtaagcagtatgaggaccagcttagctgacacacccccagctggccctccacccccacctcaagtgccttattctcacagcaagccccttagtccccaagcccctccccctaaggcagctgggggagaggtgacctagtactggaaaataaatctgtgctacgccccccagcatcactgtgttggcctgctgaaattttggaggagtggacatccaggaattgtttcccccaagaaaaacaagatgacagcagaggctaaagtcatgtttattgggagatgaggacatgccatgaccactagtgtgtctatgggggagggggtgcaaggactagttcctgacacccccctagggactcattcctggatgtagaggttgctgggagcagtaggatcatccactgggcgtgtctccaccactacaggcctgtggaaggaagagataagtcagttcatttattcattcatatgttcattgattcattaattcacaaagtagttaatagagactgtgccagccccatgctgaactatagcagtgaatgggcagacacggtccctgcccttaggaagcttgcattctagagaaggagatcaacatgaatcagtgaattacatgagtgcaaaaaagcatggcatgtctggcagggaaacctaacccaggaggtcagcccagactccccagagaatggatggtgcagcctgaaggggggttaggagggaacttggtgaaagggcaaggaagagtgttctggctggggagaacagcctgtgcaaaggatttgaggtgggagaaaggctgggacttggctggagatgtcatggccttgtgggctgtggccaggattgagtctttatcttgaggccatgggaggattttaagcagggagacagtgacacgatcagatttggatttaaagtgacccttctggcatgtcaaaaggacacaggggctacttaaagtggttcccactggctaaatttaagaccatttgtgcctcaaaataaataatgacaaggccgggcatggtggctcatgcttgtaatcccagcactttgggaggccaaggggggcagatcacttgaggtcaggagttcaagaccagcctggccaatatggtgaatcccatctctactaaaactacaaaaattatccaggtccatcctggctaacacggtgaaaccccatctctactaaaaatacaaaaaaaaattagccaggtgtggtggcaggcactatagtcccagctactcgggaggctgaggcaggagaatggcgtgaacctgggagccagagcttgcagtgagccgagatagcgccagtgcactccagcctgggcgacagagcgagcctctgtctcaaaaaaaaaaaaaaaaatttatccaggcatggtggtgcacgcctgtaatcccagctattcgggaggctgaggcaggaggatcgattgaacctgggaggcagaggttgcagtgagctgagatcacaccactgcactccagcctgggtgacagagcgagactccatctcataaataaataaataaataatgacagtaatagactataacccacagaataaaaatccatgagaccatgctggtataaagaaagaagaatggagaagacacagctcttctttagagtagaatgccaactaacacacgcagaaggaaacatagaatcagaaaatcaccatttattgttagtagccacctaacaataatagattcagggaaaaatcaattgattctaaaactagtgggcaggccaggtgcgttggctcaaacctgtaatcccagctactcgggaggctgaggcaggagaattgcttgaacctgggaggaggaggttgcagtgaggcgagatcgtgccactgcactccagcctgggggacagagtgagactctgactcaaaacaacaacaaaagacaaacaaaaaacaataaaactagtgggtgaaaatctgatgagaaacaacgtatttacagactatttacctcgtctcagtgaatctccccaaaagatacttctttttttttttttgagacagagttcactcttgttgcccaggctggagtgcaatggcgcgatctcggctcactgcaacctccgcctcccgggttcaagcgcttctcctgcctcagcctcccgagtagctgggattacaggcatgcaacaccatgcccggctaattttgtatttttagtagagacagggtttctccacattggtcaggctggtctcaaactcccgacctcaggtgatccacctgcctcggcctcccaaagtgctgggattacaggcgtgagccaccgcgcccgaccggtgggatacttcttattacaaagaaaaacagaggctgggtgcggtgacccctgcctataagcccagcactttgggaagcctacacaggtgaatctcttgagtccaggagttccagaccaggctaagtaacatggcgaaaccctgtctgtacaaaaaatacgaaaataagccaggtgtagtggtacgcgcctgtcatcccagctacccgggaggttgaggtgggaggactgattgaacccaggaggtcgaggctgcagtgagccatgatcgcgtcactgcactccagccagggtgacagagagagaatctatctttaaaaaaaaagaaaaagggagaaaaaagcaacttcacagtggagagaactggctgattctaccttaaccaaatgaccgaagttaatatcaccagtaatgggacaaactagcattgtgtacttcctgaaatgatgcactgagaaagacatctttctgcagtattcctgcccaaaattcagaacgtggaaacctcaaacacagttaagggacattttagaaaacaaatttcctttaatttttaaaaaggtcaaagctcctttaagacaaaagaagttttaattattttttccggcttaattataaagaaacatggctcctaagtgccacctatgatcttggaccagaaaaaaaaaaaaaaaaaaaaaatatatatatatatatatatatatatatatatatatatatataatcacgggcgtcactaggacaacgggtgaaattttttgttgttgttgttgttgttttctgagacagagtctcgctctgtcacccaggctggagtgcagtggcgtaatctcggctcactgcaacctccacctctccgattcaagtgattctcctgcctcagcctcccagctgggattacaggcacgtgccaccacacccagctaatttttgtatttttactagaggtggggtttctccatgttggccaggcccatctccaactcctgacctcaggtaatctgcccacttcagcctcccaaagtgctgggatgacaggcgtgagccaccacacctggccaactggtgaaattgagtaggggtatgaattagaaggttgtgatgtttcagtgttgttttcttgattttgacagctgtgctgtggtttgtaacattatgtccttgctttgattcaggaaacatacactgaagtattttaggggtaaatgggcatcacgtctgcaattcattcccaaatattcattaaaaaatcacacacacacacacacacacacacacacacacacatatacttgtatgtgtggtgtgtgcgcataagaaagagaagaggccgggcatggtggcacatgcctgtaatcccagctactcgggaggctgaggcaggaggagtgcttgaacccaggagtgggaggttgtggtgagctgagattatgccattgcactccagcctgggcaacaagagcgaaactctgtctcaagaaaagaaaaaaaaaagaataataaggcaaatgcggttaaaaagattaacatctggccaggtacagtggctcacgcctgtaatcccagcactttgggaggcagaggtgggtggatcacctgaggtcaagagttcgagaccagcctaaccaccatgatgaaagcccacatctactaaaaaaacaaaaaaattagctgggcgtggtggtgtgcaactgtagtcccagctactcaggaggttgagacaggagacttgcctgaacccgggaggcagaggttgcagtgagtggagatccactgcactccagcctgggccacacagcaagactccatctcaaaaaaaaaaaaaaaaaaagatctggttaatctggataaaagggatttttgcaacttctctgggagtgtgagttttaaattatgtcaaaatagttaaaatagttatttttaatagttaaaaatttttaataagataaaaatctaaaataaaaatgcagccagggctgggcacggtggctcatgcctgtagtcccagcactttgggaggccgaggcgggcagatcacctgagatcaggggttcaagagcagcctggacaacatggcgaaagcctgtctctactaaaaatacaaaaattagccgggcacagtggcacatgcctgtaatcccagttactcgggaggctgaggcaggagaatcgcgtgaacccagtgggtggaggttgtggtgagctgaaatcacgccaccgcattccaggctgggcaacagagcaagaatccgtctcaaaaaaaaaaaaaaaatgcagccaggtgtggtggctcatgccagtaatcctaacattttgggaggccaaggtaggaagattgcttgaggccagcagttcaaggacagccagggcaacatggcaagaccccgtctctacaaaaaaattttaaaaattagccagttgtggtggtgtatgcctgtggacctagctacttgggaggctgaggtgggaggatcagttgagctcagaaggtcaagactgcagtgagctgtgtgtgtaacactgcacttcagcctgcgcaacagaatgagaccttgtctcaaaaatgaaataaaattaaggccaggtgcagtggctcactcctgtaatcccagaactttgggaggccaaggcagctggatcacctgaggtcagtagtttgagaccagcctggctaacaaggcgaaaccccgtctctactaaaaatacaaaaaatagccaaatgtggtggtacacacctgtaaacccagctacttgggaggctgaagcatgagaatcacttgaacctgggaggcagaggttgcagtgagctgagattgtgccactgcactccagcctgggcaacacagcgagactctgtgtcaaaaataaattttaaaaaaattttataaataaaagaattaaaattaaaaaataaaaggattggccaggtgcagtggctcatgcctataatcccagcactttgggaggccgaggcaggtggatcaccgaggtcaggagttcgagaccagcctggccaacatggtgaaatgccatctctactaaaaaatatagtattagccgggtgtggtggcacatgcctgtaatcccagctacttgggaggctgaggcaagagaatcgcttgaacctgggaggcagaggttgcagtgaaccaagatcacaccattgcactccagcctgggcaacaaaagcaaaactccatctcaataaataaataaataaataaataaataaaagaattgctgggcatggtggcacatgccggtagttccagatactcaggaagctgaggtgggtggatcacttgagcctgggaggtcaaggctgcagtgagccgtggtcgtgccattgcactccagcctttgagtacagtgagaaacaaaacaaaaagagagaacgcccccgtggctgcagtgcagagaacagactctagggagcagggatggaagcagggtgaccaggtgagacactgtccaggctagagataccttgctggggacacctcagaatgctctcttcacatcagaagccccctcccaggtccttctgcaccccaccccacaacatacctgggggagccaagcagacggaaagtgagggtagggtctctcagctcctgtagcagctagggaaaaaaagtgtgtgtctcagtgcctggaagatacctccactgtcactacgaacatggctcccttaaagacagcaaggagctgggcacggtggctcacgcctgtaatcccagcactttgggaggccgaagtgggtggatcacctgaggtcaggagttcgagaccagcctggccaacatggcaaaacctcgtctctactaaaaatacaaaaattagctaggcatggtggtgcgcgcctatagtcccagctactcaggatctgaggcagaagaatcacttgaacccgggaggcagaaattgcattgagctgagattgcgccactgggcgtgccactggagccgagatctccagctgagataatttttgtatttctactgaaaatacaaaaattagccagctgtggtggcgcatgcctgtagtcccagctacttgtgagggtgaggcacgagaatcgcttgaacctgggtggcagaggttgcaatgagccaagattgtgccactaacactccagtctggggaacagagcgagactccatttcaaaaagagggaaggaactgagtgagcaaaaataaataaataaaaatactaaagtgtaagggcaaagtctgacacagtattctgtgagataaacaccattttccaaatgaggacagtgaggcacaggaaggttaagtcatttgcccaaggccactcagctgaattccaacccagacagtcttgtcttaactatccatatatctctatagtggtccccattttacagttggggaacagaagcttaaagagaagcaacgttgccagcccaaggtcacagtagtggcccaggatgagattgggactcaagaaatccaagagcagccaggtgcagtggctcacacctgtaatccaagccacttgagaggctgaggagggaggattgcttgagcccagaaagtcaaggctacagctagctatggttgcaccactgcacttcagcctggacaagagagagagaccctatctccaaaacaaacaggccgggtgaagtagctcacgcctgtactcccagcactttcggaggctgaggcgggcagatcacttgaggtcaggagttcgagaccagtctggccaacatgacaaaaccccgtctctactaaaaatacaaaaattacctgggcatgatggagtgtacctgtaatcccagctactcgggaggctgaggcaggagaatcacttggacccaggaggcagaggttgcagtgagctcggatcatgccactgcactctgccctgggtgacagagcgagactctgtctcaaaaaatatataaaaatggccaggagtggtggctcacacctgtaatcctagcactttgtgaggccaaggaaggcagattggctgagctcaggagtttgagactagcctgggcaacatggtgaaaccctgtctctactaaaaatacaaaaaaattagctaagcatggcggcatgcacctgtagtctcagctactcaggaggctgaggcaggagaattctttgaacctgggaggcagaggctgcagtgagccgagatcgcgccactacactccagcctgggtgacagagcaagaatccatctccaaaaataaataaattttatctatctatctatctatctatctatctatctatctataaaataggccgggtgtggtggctgacagctgtaatcccagcactttgggaggccaaggcgggtgaatcaccccaggtcaagagttcaagaccatccagcctgatgaacatggtgaaaccccgtctctactgaaaatacaaaaattagccagctgtggtggcgcatgcctgtaatcccagctacttgggaggccgaggcaggagaatcgcgtgaacccgggaggtggaggttgcagtgagccgggatcgcaccactgcactccagcctgggcaacaagagtgaaactccgtcttaaataaataaataaataaaaataaaataaaaaataaatcctggggcaaagaaggggatctatctgaactgaaatttggaagatgtttcccctccaggacttcacactctgactcaggagttctcggagcccatctgatgaatgtcatgatggaggctggggggcagtgatgtggagtttggatggaggggcttacctgatccgagcctagagcccacacctgcactccatgcttccagaaggcctgaagctgacctccaaccatagctggggagaaagcaatgcccgttacccttggggatcacttgagtttccacccctgatcctgggctctcccgtccctgcacagacccacggcctccaccgcttcggtcatggggatctcaggtgtgcgaagtccccggactggggacccctccggggtcaccagcttcacagagcctggaaggagatagacggttttaagaactgtgagcaaggcttagagggttactaagggaccaatccataaattcagtgtgaaagctatgtaggacaggggcaaggcccagaggggctcagggggttctgagaagcacaagttcggaggcagagatctagggactgcagctggaggggtggggaggaaggggaggaaggagggttctcaccatccatcaacaccatcaccatatcttcctctacctgggtcacctgcacgggtcccctgtgctctgtttggggggagtgggttaaggattgaccccaccccattcccctttccccacaccacccccagaaggccagtacctgtgctttagccaccgcctcagttcacaagcaagtgggctaaaccccgcccaccatcccggtcccaccccatcatcaatctccccagttaactaaaacctgccattctcccttctccgcccttccagccctttctcagtcccgtagtgcctcaggctaagcgaagccccgcctccagctccgcccctccggatctgataagccccgccctcagcaagactccgccccactcaccggtgctcatctcgcccagccagcaagagagcgcgccaaagcgcaccgtgtggaagagcaccgacttccccggccgcccggggctcacgccgatgcacacagcgggcagctcagagcctggcccggtcagcagcgcgaacacggacagaggcgtcggcagtgggaacagcacctgctgcgggccgcacagggaggggcgggctagggggtggttcaggacggggcctcagggggcgtggcttgtagctggcctgggacttccgaaccagggccctaagtcttgggggatgccgtctagaaatgtcaggggataaggcctggtgcctccgcgggaacgggggtcgtgacctccgagtgggtgtggcttccatgtgggggcatgccaccttggcggcagacgggcagggccccaaagatagcaaaacctgcttagacactcaaagagacaggctctaaatgggctctactaggacacccagggagtggcagcattgagcctgaggaataattaggcccaggtgtgaggggcggcgcttaaggatcaggatggcttcagaaggacgaggctccaagcgcagaccgcaggtgggcggggcctcgggagattggggcggggcctcgacggaggtggggcttcatggagctcttgatagaagcgcaaagggtgcaaggccttagccacccactcctcagagttcccagcaccctcccaagccccttacccggacaagcaggaatttgttcatgggctggtaccactgaagcaggacaacggacgtctccaatgcaccgcacaggaacgggcccccagagctcgcaccctccgctgtggcatgggcaaggatgagtcaagatcaatgccctctatcctcctcgccacccacactaccacccatcttctgggttctggacacattgccttaactctgtaaccttctcaggtggatgcagttcaagcccctcctctggcctggccccgcccactctctgcacacccgtgaagctctctctcacccacacagcacgcccggcagcctttggtgtcctggatcttggtggaaaccatgttcttcctggagaataggtaggtgtgaaggggggtaggacagcaggaggcagaggggcatgggaggaattataaggctgtgtggtgccattcattgggagctggtaccttgccagtaggcggtgggggctaatgtgagcgatggggtttcctgctctggtctctttccgttccagcaggccaaggatgctatgagaatacaggtggggggtctttcctgcagggtgtgtgtatgtagggggaagcaggaagttataggatcccatataccacttcctttcctccatcccttccctcagccccatccctttgtctgaaactcccaagcctgcaagtctcaagtacttgtcattcattcattcatttctcactccacatagattgaacgtccattgtaggccaggcctgctgtgcttggctctggtgaacagtgatgagcataaaaaatatgttccctaccctcgtggtatttgtagccgtatcagaaactctggacacataaccagtcagatgaagttacacatcttacaaagttttagaagaaacacatctagaaaatcttctagtttgtcatcacagatgtggctttcactaactcatgaatcccatttggcttggtgtttcccccaaaactagaaattatttcatttatttattattattattattattttagacagtctcgctctgtcacccaggctggagtgcagtggtataatcttggctcactgcagcctctgcctcccaggttcaagcaattctcatgcctcagcctcccaagtagctgggagtagaggtatgcgccaccatgcctggataatttttgtatttttagtagagacggggttttaccatgttggccagtctggtctcgaactactgacctcaggtgatctacccgcctcggcctcccaaagtgttgggattacaggtgtgaaccaccgcacccggcctatttattgttatatatagacagggtctcattctgtcttccaggctggagtgcagtggtgtgatcatgactcactgcagcctctaacttctgggctcaagtgatcctcccacctcagcctcccgagtagctggaaccataggtgtgtgccaccacacccagctaatttttttttaatttttagtagagacgaggtctcactatgttgcccaggctgatctagaactcctgggctcaagcagtactactgccttggcctctcaaagtgctgggatcacaggcatgagccactgcaccccgtccagattttgaaatctataacttgctcactctatcttagtaaagtatggaataagttctgattgtcatctgaacatgaaagctatttaaagactaacttagggctgggcacggtggcttacacctgtaatcccagcactttggggggctgagacgagtggatcaccaggtcaggagttcgagaccagcctggccaacatggcgaaaccccgtctctactaaaaacacaaaaaattagccgcgtgtggtggcaggtgcctgtaatcccagctacttgggagggtgaggcaggagaatcgcttgaacctgggaaacggaggttgcagtgagccgagactgcgccactgcactccagtctgggcaacagagtgagagtctatctcaaaaaaaaaaaaaaaaaaaaaaaggactaatttaggccaggtgcggtggcccacacctgtaatcccagcactttgggaggccaaggcgggtggatcacctgaggtcaggagtttgcgaccagcctggccaacatggtaaaaccccatctctactaaaaataaaaaataaaaaaagtaaaaaaaaaaaaagccagtcatgatggctcacatctgtaataccagctactcgggaggctgaggcacgagaattgcttgaacccaggaagtagaggttgcagttagccaagatcacgcccctgcactccagcctgggcaactgagtgagactcggtctcaaaaaaaaaaaaaaaaaaaaaggctaatctaaggccaggtgtggtggctcatgcctgtaatcccagcattttgggaggccaaggcagttggatcacctgaggtcaggagtttgagaccagcctggccaacagggtaaaactctgtctctactaaaaatacaaaatttagccaggtgtggtggtgcacacctgtaattccagctactcaggaggctgaggcatgagaatcacttgaacctgggaggcagaggttgccgtgagctgagattgtaccactgcgctccagcctgagtgacagagggagactctgtctcaaaaaaagaaaaaaaaagactaatttattgtagaaactacctcaaaattgacttgagaggtgaggactattgtgaaccccattttacaaatggagaaattgaggcttggggagcacagtcaaaaagtgtctgggatttgaacctaggactttgtgaccaagcagtctaagttttttttcagctgtgcccgtctacttcccagcccccgaacccttggaccccttaacttccgaccccatcccacctgctacccacagccagacctgagagagacatgagaacgttgttgatggagtacacccacgtagtccggctaggaaagagctgcagggaatgggagagatggctctggtgacaccccagcaacccccgactccggcccttgcccttgccctggcccggtatggttcctcaccatttccagcgtggcctcctggtcattccggttcaggatgaagatgccttcctctgcccccaggagcaggtgctggtctggaggcacagacaaggacgctgggaccgacttcatcctcagggacctcccagatccccacctgtctgacctcaaacactgacactctgtccccagctctgaccctctattctttctccaaaccaatactcccagcctctgtttccccaaacaaagccagagcggacggtcccgcaagccagtctcactctccctccttttgactacccatattctggtggttctttcttctctgcccaactgtcttctgaaccaaactgaccccaaccttagacctgtcccccaaaatagtcctctgatttcctcccctctttctccccagttctgataccctaatgccaatcctaacattgaccttcaaactcagacacccccaaacaggactttttctgtccagtgtgacctgttcctttaacactgaccttgtcttcatctctttgatctctagattctgtccctttctggctgcatcctaatctctaaaattcctcaccccaaaatgctgctcccagtctccctatcattaacctccagctgtccatctttctcgtgctccaaactctaacctttttgttatattctgacactcctggcccctgaattccaatattcctactttcactctccaactcatccctctacccattttttttttttttttttttttttgagactgagtcttgctctgttgcccaggctggagtgcagtggcatgatctcagctcactgcaacttccgccccctggattcaagcaattatcctgcctcagcctcctgagtagctgggattataggcacgtgctaccacgcctggctaatttttgtgtttttagtagagacgaggttttaccacgttggccaggctggtctcaaactcctgacctcaaatgatccgcccgcctccgcctcccaaagtgctgggattacaggcgtgagccaccatgcccggcctacctagcttcttttgtatttttagtagagacggggtttcaccatgttggccaggctggtcttgaactcctgacctcaaatgattcacccgcctcagcctcccaaagtgctgggattacaggtgtgagccaccacacctggctgccctctatgcatctttgatcaccaaatcctgagtgtaaggacaagctccgcccctgtttcagcctggccacaccccaactccattaagctcctccccgtccctgcctttgtgccttccttaggcttctccccacccctacttttgctctcccattccctacaggatctccttgaccctccagaatgcccacccttggtggagggatgtgtccaggcggccgtgctgtggatccggagggggcagccattgaacaactttacgagaagggcacatccctgggcaggtcgccgcggggccaggcagcagatccggcaaagagagcagggaacaggaaggggcagtggttacgactttggagcgagagtgccaaggttcaaatcctgcctcttaccttggtgcaatttcccataatctatccctgtaatacactttttcatacattgagttttcttttcagtttgtttttgtttttttttgttgttgttatatatttctttttttagtttttcctccactatcctaaatcatcagcatttgttttttttaagacagagtctcactcggttgcccaggctggaatgcaatgacatgatctcagctcactacaacctctgcttcccaagttcaactgattctcatgcctaagccttctgagtagctgggaccaaaggcgtgtgccaccacacccagctaatttttgtatttttagtagagatggagttttgccatgttgcccaggctggtcttgaactcttggcctcatgtgattcacctgcctcagcctcccaaagtgctgagattacaggcgtgaggcaccactcccagctgtcagttttgtttttggagatggagtctcactctgttgcccaggctggagtgcagtgatgcaatctcagctcactgcaacctccacctcctgggctcaagcaattcttctgcctcagcctcctgaatagctgggattactggcacacaacaccacgcctggctaatttttgtattttagtagagacagggtttcgccatgttggccaggctggtctcgaactcctgacctcaggtgatgcgtctgccttggtctcccaaagtgctgggattacaggcatgagccactgtgcctggccagcatatatatatatacacatatacatatatatatagacacacacacacacacacacatatatatacacacacacatacatatatacacacatatacatatatacacacatatacatatatacatatatacacgtgtacatatatacgcatatacatatatacacatatacatatatatacacacatatacatatatacatatatatacacatgtacatatatacgcatatacatatatatacacatatacatatatatacacacctatacatatatacatatatacacatgtacatatatacgcatatacatatatacacacatatacatgtatacatatatacacacatatacatgtatacatatatacacatgtacatatatacgcatatacatatatacacatatacatatatacacacatacatatatacatatatacacatgtacatatatacgcatatacatatatacacatatacatatatacacatgtacatatatacttatatacacatgtacatatatacacacatgtacacatatacgcatatacatatatacacatacatatatacacacatatacacatgcacatatatacgcatatacatatatacatatacatatatacacacatatacatgtatacatatatacacatgtacatatatacgcatatacatatacacatatacatatatacacatgtacatatatacacatgtacatatatacacatgtacatatatacgcatatacatatatacacacatatacatgtatacatatatacacatgtacatatatacgcatatacatatatacacatacatatatacacatatacatatacacatatatatacacatgtacatatatacgcatatacatatatacacatacatatacacacacacatacatgtatacatatatacacatgtacatatatacgcatatacatatatacacatatacatatatacacacatatacatatatacacatgtacatatatatgcatatacatatatatacacgtatacatatatacacacatatacatgtatatgtgtgtgtatatatgtatatgtatatatgtatgattaattatgctatgcatttcatctttgaatcatttccagtgctggaggtataaattatacatacttttagccggtagccaaccaggcacggctgtaatcccaccagtttgggaggccgaggtgggaggatcacttaagcccaggagttcaggaccagcttgggcaacatagtgagaccctgcctctataaaacatttttttaaaaattagccaagctgggccgggcgcggtggctcacgcctgtaatgccagcactttgggaggccgaggctggcagataacttgaggtcaggagtttgagaccagcctggccaacatggcaaaactccgtctctactaaaaatacaaaaattagctgggcgtggtggtgggcgcctgtagtcatggctacttaggaggctgaggcaggaggatcacttagactggggaggcagaggttgcagtgagccaagatagcaccactgcactccagcctgggcgacagagtgagactccatctcagaaaaaaaaaaaaaaaattagccaagcgctactagggagggtgaggtgcatggattgcttgagtctccgaggtcaaggctgcagtgagccatgatcgcgccactgcactccagcagcctgggcgacagagcgagatactatctcaaaaaaaaaaaaaaaaaaaaaaaaagactttagagagttctaattcattttatgcatttgttggcaaatttgatgccacaaaggtgcattatcacaacactgactacgtgtgtaggcattatgcatgtacgtaaaaacactgaaacttcctgaataaagagatgttctttttgtacatctccatttatgagaggtaaaatttcttgagatcttggctctttgggcaactgcatatgtggtagtgactcatggaggttttgatggatcttgtcaaaagactctaacttctggactcaagcaatcctcccacctcagcttcccaagtagctgggaccataggtgtgtgccaccacgcccagctaattttttaaatttttagtagctgggcgcggtggctcatgactgtaatcccagcactttgggaggccgaggcgggcagatcacaaggtcaggagatcgagaccatcctggctaacacggtgaaaccccgtctctactaaaaatacaaaaaattagccgggcctggtggcgggcacctgtagtcccagctactcgggaggctgaggcaggagaatggtgtgaacctgggaggcggagcttgcagtgagccgagatcgcgccactgcactccagcctgggtgacacagtgagactctgtctcaaaaaaaaaaaagcatgccagacgcggtggctcatgcctgtaatcccagcactttgggaggccgaggcaggtggatcacctgaggtcaggagttcaagacgagcctaaccaacatggtgaaaccccacctctactaaaaatacaaaattagccgggcatggtgctgcattgcctgtaatctcagctactccggaggctgaggcaggagaatcacttgaactagggaggcggaggttgtagtgagctaagatcgcgccactgtactctagcctgggcaacaagcaaaactccgtctttaaaaaaaaaaaaaaaaaagcagaaacaacaatcctgcctcagcctgcctcctcaaaggtatttatatgaccttgggtaagccacttaccctctctgtgcttcaatttccccatttgtgaaatgggggataacatctctgtgatatcttcttcactctgtgaagctttatgccatgtaatgataggagataagtgtagggcacagagaagcgctcaacaaatgtcacctgttgttactgtcagtcctgccaccccctccccaccccaccaggcatccccagccccgtccagaggtgtaagtcctcagcagagctgaacctcacctttctcttcatcttttccttcttggggggcagaagtgggggcttgtcaagctcccgggagggtgggttccagagtgagggttctgagaggggttaggagaaaatcagcccccaagaacccccaaccctcccgccctccaccctagcctgtcccattacctgaatgggcggtgaggtgggggctgctggtggatgggggaggcccaggacgggggctgtttggtgggggcccactggcacaccggaccagcacccccgggctcagctgcccatcatcccccatgctcccaggaccctcgtctgatggagaacggaacttgggctttggagacgggaatggagcgtggggaaatacatcagatgatctcagagagggcacccttttgcaactcaagtccctgcctccaccagaactaacagctgtggctctgacccacccccccgacaacatcttgtgccccctccagccttcccctgacatccccagcctggacatcaacacacttcagaaactaatgggttaatgctggatatatagcaggggcttcctaggaccagctactgaccagtgtctaagaggctaaatattttgaatccgaccctgaggttgagggatgccacttccagatcccaatgtagccatcatcctggtctccccaattccctgccctggagagcccagtatcccagcatctaaggacctggcctcctggcccccagtggccctgaggccccagcctcccagctctggcccagggccttaccttggggggaagtggaggaggtgtgtcctctgcaggggtggggctgaaacacaaagatgggttaaatagctggggggctggggaacaaggactcggggaagatggcatggttctgggctggaggcccgggactggggtctgaggtgaggaggattaagggatgactggttctgcctggagcagaggattaaaggattaatagccaggctggacatagtggctcatgcctgtaatcgcagtgctttgggaggccagggcaggatggcttgagcccaggaattcgagactagcctgggcagcatagcaagaccttgtctccagaaaaaaattaaaaattagccaggcgtggcaggtgcgcctgtgaccgcagctactcaggaggctgaggtgggaggattgcttgagcctgggaggttgaggctgcagtaagccatcattgcactcctgcacttagccttggtgccaaaacaaatcatgagtttgagaccagcctggacaacatggcaagaccccatcctacaaaaaaatgattagcctgtttccaaaaaaaagactaataacagtaacagcaactcttggaggtggagtgctgacagtgcaccacggctttgcacctttacaccacctagtaacacaggtgacatcagcgccgtggccctgctctccctgtgctggcgccacacacaggctgtcgcacgtgatgggtgaagtgagtgcgcgcacctggatggagcctgactcggcctgtgggctggggagtatgggggcctgggctgactgttgggtctggatctggggctcagtatctggtctttgggagatttccaggtgccaaggttcagcctgagggcgggcaaaaagataggaaaagctgagggctggggctgaaggctggagggtgggtctggggtgagagtgacattcgggaggagtttgagactgggatgtggctgagggtgcagggtcatggaggataggtggggtcaagtcagagattggagcagcagcacattctagaaggaactggggtcagctctggggtggagagcaggtggggggctgacgctgagggtcaagtcaaaagattgtataagaagatggaaggaggccaagtgcagtggctcacacctgtaatcgcagcactttgggaggctgagatgggcggatcatgaggtcaggagtttgaaaccagcctggccaacatggtgaaaccccatctctactaaaaatacaaaaaattagctgggcatggtggcaggtgcctgtaatcccagctactcaggaggctgagacaggagaatcgcttgaacccggggagccgaggttgtagtgagctgagactacgtcactgcactccagcctgggccacagagtgagactccatctcaaaaaaaaaaaaaaaaaaaaagaagaaggtggaaggaaagaaggaaagtgggagctggagctgggatcaggttgggggtcaggggttggaggtgaagggttaagggaggtggggttagggaacagggcctaggtagctgggcagaggggctgcattgagggtctaatcagggctcagggctcggggctagaagaaaggcaggggtgcagcggggtcaggagtggaggaaaggccacatcaggggattgtaggaaggtgggggctgaggtggggcctgtggagctgcaggcagggcctcacttacatgtccacgtcgtcatagtcatcgtcagacgactctgacagttgcttcctgaagggtgacaggtatgagccttgggggccttgtccacattccagccccctccccatcctccctggggtccctgacctggggctgctgctcctgaggtctcgaggaggctgtaggcgagcctgtggggtaggaaaagggtcagcagtggcctcagggaagcaggcggtgtggtggggagtggggggacagcatctcacggtgttggctgggggtctggtctccattcctcggagcttcctgaactccatgtgccgccctagggtgggtgggggaagataacctgctgtgagctgggggcaaggggtaacgagatgggtttaagaacagaaagagtagaattggcgggggggttgcagtcaggatcttggggactgcaaatgatctcagggaactgtcccttggggaaaggggtcttggattacagggacttcatttgggggtcaagtttgggatcaagaccaggtgcagtggctcacgcctataatcccagtactttggaaggctgaggtgggcagatcgctggaacccagagtttgagacctgcctggacaactgggcaagaacccatccctacaaaaaatgattaaaaattagccaagtgactgggcacagtggctcacgcctgtaatcccagcactttgggaggtgaggcaggcagatcacctgaggtcaggagttcatgatcagcctggtcaacatggtgaagccccgtctctactaaaaaaaaatacaaaaattagccgggcatggtagtatgcgcctgtaatcccaattactctggaggctgaggcaggagaatcgcttgaacccaggaggcagaggttttggtgagccaagatcgcaccatcgcactccagcctgggcgacagagtgaaactccgtctcaaaaaaaaaaaaaaaaaaaaaaaaaaaaaacattagccacgcgtggtgaataagcctgtagtcccagctactcaggaggctgaggtgggaggattccttgagcccaagaagtttgaggcttaagtgagctgtgatcacaccactgcactccagcctgggtgacacagcaagatcctgtcacaaaaaaataaacaaataaataagttttgggatcaggaagttgggggctcaatgtagttacagggtgttttcaggatccgtttgggtattgaggttctgatgagatttctgaggtctccctgggaactctatggtcattttgcttttgtttttgttttgttttgttttgtccttgagacggtctcgctcttgtcacctggactggagtgcagtggcgcaatcttggttcactgcaacctccacctcccaggttcaggcaatcctcctacctcagcctcccaagtagcttggactacaggcgtgcactaccacacccggctaatttttgtatttttagcagagacagggtttcaccatgttacccaggctcgtcttgacatcctgacctcagatgatctgcccaccttggcctcccaaagtgctgggattacaggcatgagtcaccacgcctggcctctacggtcattttgtagttcaggtgctgatgagattgtctggggtctcttataggatcagatgatgctgagggtctctggaggcctgatggtaggggaaggtggtctcttaggtctattatagggtcaggtgtccccaaacataaggattctctactcacgacagcagtctgcatctgggatccccagagagctggagcggtgggtggatctgatccgccgagggatagcagggggtagctgggcagaggggcagccacgtcagggctcaagacccccaagcagcctcctaccctgcccggggtccatctgctctctcctgtaaccctctgggcacacagccttttaccaagctccccatcctccctccctgttttccccctaagagaggcagcaggaaggcactgctggcagcaggcacagcctgagaaagaccgagaggtccccagtgctcttgtcagccaaggctctcacctcgggctcctcatcctcaatgtccccaatggagggtcctttcccgggattcttcagtttgtcaagaagatccaggatcaggcctcgattcagcccaggctgggataccagttgatgctggcggagggaagaggtgtccgtatccagagggatggtgtggacagagagggctggtgtggacagagaggactggtacagggccttggggactggactaaaggaatctagctggggagaaggtgccagtgaaggcagagggcggggaaatccagggaactcagaggcctggggtattcttttttgtttgtttgttttaagacagagtctcactctgtcacccaggctggagtgcagtggcacaatccaggctcactgcaacctccacctcctgggcttaattgattctcgtgcctcagcctcccgagtggctgtgattacaggctcgtgccaccacgcccagctaatttttttttttttttttttttttttttttttgagacagggtctcgccctgtcactcagactggagtgcagtggcacgatcctggctcactatagcctccgcctcctgggtttaagcaattctccaacctcagcctcccaagtagctgggattacaggcgtgcgccactatgctcagctaatttttgtatttttagtagagacggggtttcaccatgttggccaggctggtctcaaactcctgacctcaagtgatccatctacctcagcctcccaaagtgctgggattacaggtgtgagccaccatgcccagccgaccggtgggagtctaagacatttttaggaattagaagaatttaggtttctcagagcggggctaggagaattccagagttgtcttggaagagactgtggttccctggggattcaagaggacactcaggacaagtcttgagtcctttgggaatttgtcagttccggcaactcggggtatttgggaaaggtctggggtataacccggagggtctctggtggtcgggggtggtcctgggaaattctgaggcactagggactttggaaaggccacggggactccatggaacaaagttatccatgtcctcgggagttgtggaaggccccagggaatcctaggctgaggatcttggggaagggagggttacactgagcatcttggtggcgctgggtcgtttcttgggactcttagtcagagtgactttgatgaagttgtggaaggcagccgaccttgggaagaagaagccaggttctggatgaggggaccagaaaccctcccatcaggccacccagccccagccctgccctctctcaccctccctcctgttactctctcgtaccatttgcctttttccttcagtcggggaggctggtagccactcttggtcatgaggaagagaactctagaatagtagggaaaggacatggggttcagaccctcaagggggccagacctcatggcttgaggggttcctagtagcattgtggtcagcagagggcaaagtgagaaacagcatggaagtgaggttcaggttttacagtgcaccagggtgcctctcctaagggaagccatttatgaagtgatagagctatggcaaggccaggtgtggtggttcacgcccgtaatcccaacactttgggaggccaaggcgggaggatagcttgagcccaggagttggagaccagctggggcaacatagtgagacaaaaaaaaaattttttttttaaatagctgggtgtggcaatatgggtctgtaggaccagctatgtgagaggctaaggcaggaggatcatttgagccccggcattcaaggctgaagtgaactacgatcgtgccgctgcactccagcctgggtgacagagccagatcctgtctctaaaaataataagaattaattaattaatttaaaaaatgtctgggcgtggtggctcacacctttaatcccagcattttgggaggccaaggcaagtggatcacttgaggtcaggagttcaagaccagcctggtcaacatagtgaaaccccgtctctaccaaaacatacaaaaattagccaggcatggtggcgtgcacctgtaatcccacacttgggaggttgaggtggtagaatcacttgaaccctggaggcagaggttgcagtgagctgagatcttgccactgcactccagcctgggcaacaagagtgggactccatctcaaaaataaataaataaataaaaataaaaataaataaataggctgggtgcagtggttcacgcctgtaatcccagcacctccggaagccaagatgggcagataacctgaggtcaggagttcgagactaccctggccaacatgttgaaaccccgtctctactaaaaatacaaaaattagccgggcgtggtggtgcacacctgcagcctcagctactcgggaggctgaggcaggaaaatagcttgaacccaggagatggaggttgcagtgagccaagattgtgccactgcactccagcctgggcaacagagcaagactctgtcttaaaaaataaaaaataaaataaaataaaatattaaattaaatttaaaaaatagagctgcagcacgtgcaaaggtaggctcaagtggtgatccctgaattggaggttcctgggatggaaggcggaagctgagggtgggctttgggccagggctagacaggatctctgggcctggggaccccacgcctgcctacctgagagggtgcacatcaaagagcggtggctgtagctcggccagttcgatggccgtgatgcccagggaccagatgtcacacagctcattgtatcctcccttcagggccacagctgccacttccggagccatcctgggggcagacacgctcagagagccagaggtggcatggggacaggaagggaaggaggggcagagaaggagaaggagttgaggggagacgcagcacacagagagtcagatggagagacagagggacaggagtaaagacagacacaggcagatgaagacagagatgcagacggggcgcgatggctcacgcctgtaatcccagcactttgggaggctgagcaaggagaatggcttaggcccaggagtttgagaccagcctgggcaacttatcaagaccctatctcggctgggcacggtggcttttgcctgtaattccagcactttgggaggtcaaggcggacagatcacctgaggtgaggagttcgagaccagcctgaccaacatggtgaaagcccgtctctactaaaagtacaaaaattagccgggcgtggtggcaggcgtctgtaatcccagctacttggtggctgaggcaggagaattgcttgaacctgggaggtgaaggttgcagtgagctgagaccatgccactgcactccagcctgggcaacagagcaaaactccgtctcaagaaaaaaaaaaagaacgaaaaagaaaaaaaaaaaaaaacaacaccatctctacacaaattttaaaaattagccaggtgtcatggtgcacacctgtggtcccagctacttgggaggctgaggtgggaggatctcctgagcccaggagttctaggctgcagtgagccgtgactatgccactgcaatccagcctgggccacagagtgagaccctgtctctaaaaacaaaacaaaatgaaaagacagagaggcagagacagagagtgagagagacagaaacaaagagacagagagcactgcaaactgagctagaggaaaaagacagaaatggatatggagggacagagaaatcaagataaaaatcaacacaaacaccgagagcaatggccagaaaagggcacaaagagagaggaaaatggaaaactcaagcgacacccagagagaatgaaagaatcttccaaggagaaaggacgaggcaggggaacggagccaggaaagaggatcccggggaaccagggtaggaaaaaccactgacccccactccacccctagctgcccgctgggcgccactcaccagtagggtgtcccaatgaaagagaggcgtctggccagtgtagccccaatctgggccgagatgccaaagtcagctggaagcagagggagacatagtgatctggggtccactgcgcttccggccccccagtcagcccccctgctcaacccccagccttactcacccaatctgacctccccagcatcattgatgaggatgttagctccctgggaatgagaggggatatgggaggctgcagagactctccccagcccagtgctagcccactccgccagctcaaactaccctgatccctgagcccctgaaatgccactcccatctcctgggccccaccccccaacagcacccctacacccccagaccaccttgatgtccctgtgtatcttcttctgtgagtgcaaataggccagtccctggggagaagggtggacaaggggacagtgagtgtttgggggctggagtggggccaccctcccctcccatccccagaatccccaggcctctccttacctggagcacttcccggcagacatagctaatctggagctctgacagggagcctgtcactgcaaaggtcaccccggccaggccaggcattggatgggagccagggaacctgggctggggagtcctgcccccccacaccagctaagagggtgccatagggagaggggaaataggataggaccagtgggagggggagatggtggggtggtcagtgacagaaagaggcagcaatgcaaataaaagaggccaataggcctggcgcagtggctcatgcctataatcccagcactttgggaggccaaggtgggtggatcacttgaggtcaggagtccgagaccagcctggccaacatggtgaaaccccatctctactaaaaaatacaaaaattagccaggcatagtggtgcatgcctgtaatcccaagtactcaggaggctgaggcaggagaatcgtttgaacccaggaggtggaggttgcaatgagccgagatcgtaccactgcactccagcctgggcaatagaaggaggctctgtctcaaaaaaaaaaaaaaaaaaaaaaaaaaaggaaagaaggaaagaaagaaagtaagcaagataaataagtagaatatgatatagttcctcagacgctgatagacagcaagaagaaacataaagcaagaaaggtgcgcgtaggaggagctatgacatttcacagaggtggtcagtcagggctgctctctgaaggtgacagtgggtgaagacatgagggctcccactctgagtgggaccagccacagcaagtgcagggccccaggtgggatagtccctggtgggtctggaaagcagcaaagggggtggggtggagtggagggggaggaggaaagtgggaggaggtgagattggccagcatggggtggaccctgatgaggagtctgggcttctcctccgagagaaatggaagctgtaggagggctctgagcaggggcgtcatgtgactttgcaaaataaggaaaggcacagagacagagagagacagagaaacggagacagatcatacatgagacatacaaaaggaacaggattgaaaaaaacaaaaaaatgagacagaagacaaagacagaggtcagaggccaaaatatggggagacagacagatttagagagagacccagagggtaacgaggtaagaacaacacacaggcagagagacagagagacagacagacagagagaggccgtcagacatcaggtctgacagaccagctgtgggattcacttcctctctttgggcctcagtttccctcctgaggacttctcaatgacgtccttccttttctaacatttgaggtctagggctggaaggaatcagaggttttccgcctcccagaatcaaacgattctcctgcctcagcctcccgagtagctgggattacaggcgtctgccaccacgcccggctaattttttgtatttttagtagaggcggggtttcaccatgttggccaagctggtcttgaactcctgacctcaggtgatccgcccacctcggcttcccaaagtgctgggattacaggcgtgagccaccacaccaggcccagcagttatattaaaaaaaaaaaaaaaaaaagccaggcacagtggctcaagcccgtagtttcagcacttcgacagctgaaggcaagaggatcagctcagcccaggagtttgaaatatggcccagaaagacagttcctgtgagatacacacacagagacggaagaggtgaatttgggtcggggttggggggtggggatagggaggggtgcttgggtcccgttgtcctttctctaaccttggtagatgtcctggagagaaccagccccacagaattccatgcagatccagagtttctgcaacctgcagtggttcaagagtaagaataataatagcagtaaatacattattatttgcaggaaagcccctggtttgcttctgtcttgttctagttcaataagaactttaacgtaacagctctcatcactccacctctccttgtctaccagagtgaggttgtttcattcccattttacagacaaggaagttaaggctcagagaggaaatgtgagttccggggcaagtcaactcaaacctaggcctttgggcgggaccccactgccgtcccacgccaacctaggaggcagggcagagatctcacgggttgtggagatttggaggggacagaggggcccagggcacctgttctggggagcagaggtcattattggggcatctggaatattaatttggggatcagggaatttaggagtttatattaaaggagcagagagtgaaactgggtgagccaaagagcagaatggtgagagcttcgtttcaagggagttgatttcaaattcagttactatgaagagatcaatttggggtactcttggtcagaaatgggaattttagattggagattagattagaggctgctctggtcagaaaagtgggacttaggagtgaggatcatggtagggttagcccagtcaaaaatgggggtccaggatgggaggtcgggttatggtgagaaatggaagttcaaggttagaactgagggtgccaagaccaggcgcggtggatcacacctgtaatcccagcactttcggaggccgaggcgagtggatcacaaggtcaggagttcaagaccagcctggccaagatggtgaaaccccatctctactaaaaatacaaaaatttgccgggcagggtggtgagcgcctgtaatcccagctactcgggagtctgaggcagagaattgcttgaacccaggaggcagaggttgcagtgagctgagatcatgccactgcactccagcctggcaacagaacaagactccatctcaaaaaagaaaaagaaaagaaaaaaaaagaactgagggtacccccatcaagaaatggggactccgggttaggggctgggctgggtgccagggtgggtctgaggttcatcaccagagataactcccatggtaggccacgatgttggcgtgccggcaagttttcaatatgaggatttccttctgaagggtggagacatcatcatctgtgaggagggcgggagagaaaaggcagctcgcatggggagagagctacaggggaggtgatcccagtgtcccaggaggcgaaggtggggatgtggggaaggagctccatgttccctcctcaccaggctccatcttcaccatcttcagtgccaccaggtcccctgacaccttgtctcgagccttgcaaaggggaagttggcagtcaggcaggctccatttgccagagtccctccacagcatccctgagtcaaggtcaagaactgggaccccctcttgcagcctcctccctgccgagggcttgccttaaaggtcactggttgtagggtgttggggacagaggggcttcctcaccttaaagacttccccatacgtgccgccacccagccgctgtagcaggtcatagtggtcccgggggtctctattgaaaatgtcagggtccacgacgtccatccctgggggcctgagctgggcctgcgcccaggggccagcagggcctcagggctcaacttctggcacctccctccgtccccagaagccctgcacccgccttgcctccgcgggctgtggcctcccccctcctcactctcgcttcctgccccagctgcactgcacgactgtgcaacgggctccacccccccgtcccctgggctctgagagcctctgaggggcagcttgtcttgggacccaagggaccaccctcaacctccaaggcccagggctggatgtaaatgtgatgcaaatgatcttaatcgtaactgggttggaggggggtgccttagaacccccgcccccgtctcctaggtagtgtctaaacctctgctgggtgcttgaaggtttggccacaacccgaaggcggcaggtctgcaaagggatggctatgcagtgtacatgcctgttcacctgtcacatacatgcacttgggttacctcctctgcactgcgcaggcgtgtagacgtgcatctgcctggatacctgtgtgcacagtacacacgtggatgtacccaggacatatacctccacatgcatggcacataactgcattttgtaggcctgcagtgtacaaaacctatacataatatataattcatggcagtacaaatgggacgctcgccctcagctccaagaccggaacctaatggagacggggcgcgatccggcgaagtccaggagccctcaccccagcccctgcccggcagagcacagtagctttgtgggaccctcctcctggagctggggaccaagggctgagacttgaaactggagagctcaggatcctgcaccaggcgcccaggcctgtggcaagagggacctcagaacacctccctcggaacttggccatggcctaaacgtaaggctgctgcgtgcattcccgcagagctccgtggcctcatggccgcgcgcaatacaacgcgcgcgcacgccgccagagctccgggtgcttcccggtgagttcgcgcgcgcacgctcccgcgctaccggcactggaactgggtctgtgaggcccgggaaaagcttagccccgccccctcgccacgagaggcgcctgcgcactgggatccagtaagatttttctcacgctgtctgtccagcttgagtggcgcgaatgcgcacgcgccaattgcgcctgcgaggaagaagtcacgtggcagccggaaagcgtggcggctgctgctagagcctttccctttaccgcacccaaggagctggagcgacaacaacgacgtcgtttccgtttccaccacctcttcctgttcccgtccttgaggacgccgtgccgggtcagtgttagcctccagccctggttgtggaaggcgacagaagtcatggcgatgtttgagcagatgagagccaacgtgggcaagttgctcaagggtatcgacaggtctgagcccggttggaggaagcgctctggccaagcggggcggaggagagggttttccggagacagcaaggggtgttcagggtcctgggcttgccgcggggtggggtttctctatcctcctggaggaggagatgcttaaagaaacggcactgagctgggggtagtggctcacgcctgtgatcctagcactttgggaggccgaggtaggtgggtcgcctgagcccaggagttagagaccagcctgggcaacagccaaaccccgtctctaaaagaaagaaacaaaagcactgcaaaggcctagaagcgagagaatcttggtaccactcagtctcttcgtaaattgccttaaggtttccttctctgctccgcctcctttgagtgcctcttaatctctcccttctctgctctataagtcattcattctccacacgtttactgaaataaactgtcagtgctaggcaatgctgggaaccacaggcgaatcagacagcggcagatcatgccttcacggtctgagttccctttccataagggagacaaacctgacagcagacagcgatagccgggagagattagaactgaaatgggggaagcaaaggccagagtgttcaggtggacatggaggaagtaggcagcgaggtaggcaggagaggatggggctggatcagggtggaggcctgaacaggggaggaaggggtgagtagcagagacattcaggaggccaggtgtacaagctgcagtgactgactggctcagaggttgaggaggcatcctagggaagagccagggctccagtggagtttagagcttaggcgagaggtctgggataagaataagttttactagagattatactggacataattcactacctggatagagcaagtggccagtgccagatttagaggggaagggcgggaggagcaggttacagtggccccttgctccataaggtggctggcctcagcttctgtctcctctgtgctcacctatcttgattctcctttaggtacaatcctgagaacctggccaccctggagcgctatgtagagacgcaggccaaggaaaatgcctatgatctggaagccaacctggctgtcctgaagctgtaagtgtctagctctctgtctacactcccattgcagcaactagcagggtgccactcccagtacagggcaagggggtggctggtagtatcctgaacaatgcagcatctcttggtgtgcaagactaggaagccaaggaagttgggacaggaggagggatggtttttgaaaaatcaattgccgggcgcggtgactcacgcctgttatcccagcactttgggaggatgaggcaggcggatcacctgaggtagggagtttgagaccagcctggccaacacggagaaaccccatctttactaaaaaataccaaattagccaggcgtggtgccacatgcctgtaatcccagctactcgggaggctgaggcaggagaattgcttgaacccaggaggcggagattgtggtgaaccaagatcgcgccattgcactccagcctgggcaacaagaccgaaactccgtctcaaaaataataataaaaaatcaattagggtggccgcaggggctcatgcctgtaatcccagcactttgggaggctgaggcgagagactcacttgagccaaagagttcgagaccatccatggcaacatagcgagacccaaccctacgaaaaaatttaaaaattaatgtagcggtgtgtggctgtagttccagctacttgagaggctgaggtggaaggatcgcttaagcctggaagattaaggtgcagtgagccatgatagtgccactgcactccagcctgggggacagagtgagacccctctttttaaaaaaaaaaaaaaaaaaaagaattaccaatttgggtgacatggcacaaccctgtctctacaaaaattagctgggcccagtggcgcatggctgtagtcccagctccttgggaggctgaggcaggagaattttttgagcctgggaggcagaggttgcagtgagccaagatcataccactgcactccagcttgggcgacagagtgagaccctgtctcaaaaataaataaaggttaattacagaacacatgtacaggctaatacattaagcaaacatgtagtttaacaaatcattataaatgaaagcctacataatcaccatttatgttgcaaagttattgctagcaccacaggctctttgccccctatgctctatgccaaccaattcccctgctcccccatgctctcatggcctggctttatgtgatggtttactatgcatgcatacatctggctcagctcagctcaggtttccctgctttgaacttgatacagatggagtgcatacagcacaaactcttctgcatttgccatttgctactcagcactgggtttgtgagatccatccagtgttttttgtttttttgttttgtttttgatatggctgcagtttgttgtcatggatgtatagctctccactgtgtcacttgtgtggctgtcctaatgatctcttctggctcttgatggacattgtgggttcttcgtgcccttttttttttttttttttttttggagacaggatcttctgttgcccaggctggagtacagtggcacagtcatggctcactgcatccttagccttctggactcaagtgattctcccgcctcagcctcctgaatagctgggactacaggcatgcaccaccatgcccagctaattttacttgggtgctttctttctttccttttttttttttttttgagacagggtctcaccttcttgcccaggctagagtgccttggcgtgatctcatgatctcaactcagtgcatcctttgcctcccaggttcatgtaatcctcctgcctcggcctcctaagtagctgtacgtatcggggggcctgccccgataatcacgtaggttcttttctatattcctaagcattggctggcttgagaaatagaaggacagagtacaaaagagagaaattttaaagctgggcgtccgggggagacatcacacattggtaggatccgtgatgcctcacaagccacaaaaaccagcaagtttttattagggattttcaaaaggggagggagtgtgcgaataggtgtgggcgacagacatcaagtacttaacagggtaatagaatatcacaaggcaagtggaggcagggcgagatcacaggaccacaggatcaaagcgaaattaaaattgctaatgaagttttgggcaccactgtcattgataacatcttatcaggagacagggttttgagatcaaccggtctgaccaaaatttattaggcgggaatttcctcttcctaataagcctgggaacgctatgggagacgagtttatttcacctctgcaatctcgactataagagacaggtacgccccggggggcccgttcagagacctacccctaggtgcgcattctctttctcagggacgttccatgctgagaaaaagaattcagcgatatttctcccatttgcttttgaaagaagagaaatatggctctgttctgcccggctcaccggcagtcagagtttaaggttctctctctcattcccggaacaattgctgttatcctgttctttttccagggtgcccacatttcatattgctcaaacacacatgttgtgcaatttttgtagttaacgcaattattacagggtcctggaacgatatacatcctcctcaactgacaggattaagagattaaagtaaagacaggcataggaaatcacaagggtattgattggggaagtgataagtgtccatgaaatctttacaatttatgtttagagattgcagtaaagacaggcataagaaattacaaaagtattaatttggggaactaataaatgtccataaaatcttcacaatccacgttcttctgtcatggcttcagccggtccctccgtttggggtccctgacttcccgcaacaggtacgcaccaccatacccagctaatttttgtatttttagtagagacagggttttgccatgttagccaggctggtctcgaactcctgacctcaggtgatccacccgccttggcctcccaaagtgctgggattacaggcgtgagccactgcacccagcctaatttttgtatttttagtagagacggggctttgtcatgttggccaggctggtctcgaactcctgatctcaggtgatccgcccatctcggcctcccaaagtgctgggattacaggcttgagccacccacctacccacccccaccgccaccttctgttgtcctcttttgcaagggaggaaaccgtcagcccctcagtttcctttctctgctcctcagcctttcagtgcctcttaatctctctcttctctgctcctcgtgtcataaataagcagtccaaggtcactcagcagggaagtttaaaccgaggcagtctggctctggttccttagccactactccagaccactgctgctgttctcatttgtttataaatcacttagcagtgtctgccccattgggtagttgtgagcattaactgtccctgttcacagaggagaaaggtaggctcagggaggtgaaggttacacagctgggaagcactgggactgggattggaacccaggcatgtccaattcccaaactccagaataaagcagctgcctggcacctggtgaggattggggacttggaggtgccactgtggccacgtctcttgttctttttcttaggtaccagttcaacccagccttctttcagaccacggtcaccgcccagatcctgctgaaggccctcaccaacttgccgcacacagacttcaccctgtgcaagtgcatgatcgaccaggcacatgtatccttccagcactggggccggggggtgtgtgggaaggggtcagagtcaaggtgcatgaattcccagggagatggtctgtgggtgtatccacaaacaacaagtgcctgctctggtccagcgtggcaaggtgctggacagtgctgggacactggtgactgagacagtcctgggccctgtcttcacaaagttgtcgcagtccagtgaagagtcagtgatagactggagtggtcagggttgggttacaagagtcacagcagccgggcacaatgactcaggcctctaatcccggcactttgagaggtcaaggtgggtggatcacctgaggtcaggagttcgagaccagcctggccaacatggcgaaaccccatctctattaaaatacaaaaaattagccaggcacagtggcacacacctatagtcccagttactcaggaggctgaggcaggaggatcacttgaagctgggagatggaggttgcagtgagccgagattgcgccactgcactccaccctgggtgacacagtgagactctgtctcaaaaaaaaaaagaagagccagagtaggcacctgaccatttgggtgggggaatatgtggacatgaacacagccatctgtatttacattctatagaacaatgtctggaaaggtggaaaggtacccaagaattggaaatgactgttacctcccaggaaggatggctgtgagacagggaagggaagacctattttgccactgttcactcttctgtatttttaactagaaactataaaccagggcctcctggaggagggaacatctaaaacataacgagttaggtggaggggtaggcaaaggtgatccaggcagagaggacactcatgggctaaaggaagcagagctcggtgctgtctttcaggaatggtagaggaagcctgacataggaatgatttaaggtgggtttttttttgttgttgttttattttatttattttattttttttttgagacggagccttgctctgtcacccagtctggagtgcagtggcgtgatctcggcttcctgcaacttccacctcccaggttcaagctattctgtctcagcctcctgagcagctgggaccacaggtgcatgcatgctaccacgcccagctaatttttgtatttttagtagagacggggttttgctatgttggccaggctgctctcgaactcctgacctcaggtgatccacccgcctcagcctcccaaagtgataggattacagatgtgagccaccgtgcccagcctataggttttattttattagtaataatagtagggtttttttgttaatattttctttttttttgagatggagtcttgctctgtcatccaggctggcgtgcaaaggcgtgatcttggctcactacaacctcctcctcccgggttcaagtgattctcctgcctcagcctcccaagtagctgggactataggcacgtgccaccacacccagctgcttttcgtatgtttagtagagatggggtttcgctatgttggccaggctggtgtcgaactcctgacctcaggtgatccacccgccttggcctcccaaagtgccaggattacaggcgtgagccaccaggactggcatgtcatttctcatcttttgccattacaaacagtcctgcagccaacatcctttctcctgcatacacctgcaggagaaataagctggcttccttttccagctgtttttctgagctgaagctttggaagaaagcagccagaagaaggtaggtggggaggggtgatctggggtccaaccttacgctccgaggccagttttccttaatgcttcctcctcccagcaagaagaacggccaatccgacagattttgtacctcggggacctgctggagacctgccatttccaggccttctgggtaacttccctggggtccaggggcaggggagatggcagggccatgtggagctgagtgctaaaagtaacaacggtgcacactgactggcttcctgctttggcggtgggcccagtgctctgcatgtgtgtgtttgtggaattatcatcctctcgcggagcaggtactcacaggtcatccccgtgcccacaggctgaggccgaccctttcccctttctcccatctttccactgagccctctagtacacaccgttgatcagaagtcctccagtggctgggtgtagtgactcacccccgtgattccagtacttgtggaggccaaggtgggaggattgcttgaggccaggagttccagaccagcctgagcaacatagtgaaacttcatctctacaaaattgaaaattaattgggtgtggtggcatgtgcctgtactcccagctacccaggaggctaaggtgggaggatcgcttgaggctgcgagtgagccgtgatcacaccactgcactccagcctgggcaacagagcaagaccctgtctcaagaaagagaaattctccgtctcttctacctgtctgacatgctctgcccttcttgctctaactggaacctggccccccacttctgcagccccctaagtgggaggctagatcacctcctggctcctatctcttctgataccctcagtcttttttgttgttttttgtttgtttgttttttggtttttttgagatggagtctcacgccattgcctaggctgtagtacagtggcacgatcttggctcactgcaacctctgcttcccgggttcaagtgattctcctgtctcccgagtagctagtactacaggcacacgccatcatgcccaactaaattttatatgtattttttattttattttgttttatttttgagacagagtctcagtcttgcccaggctggagtgcagtggcgcgatcttggcttactgcaactgccgcctcccgagttcaactgattctcgtgcctcagcctcctaagtggctggggttacaggcatgtgccatcacgctggctaatttttgtatttttagtagagacggggttttgccatgttgtccaggctggtcttgaattcctgacctcaggtgatctgcctgcctcagcctcccaaagtgctgggattataggcgtgaaccaccacgccgggccagaaacccccagttttgaagtgtgtgtgtcgtcacttcctgcccggtatcagtccctctggtgactgctctttgtttcttgaagaattcagcccctggctggccacggtggctcaacgcctgtaatcccagcactttgggaggccgaggcaggtggatcacctgaggtcgggagttcgagaccagcctgaccaacgtggagaaatactgtcttaactaaaaatacaaaattagctgggtgaggtggcacatgcctgtaatcctagctgctcgggaggctgaggcaggagaatcacttgaacccagtgggttcaacctcacccagaggttatggtgagctgagatcatgccgttgcactccagcctgggtgacagagtgagactccgtctcaaaaaaaaaaaaaattcagctccttctcactggcgctctctaccactcctgccctaattcttagacgcttagaaagtaacacagaggatcctttgaccacccagacctctgggtcccttgctctcttggccagctatcttgtgctacacctgacctcagcccttctcttccaatcataccccaggccagttctctgcacattagacctctgaggcatttattttctttcctttttttttttttgtttgagaccatgtctcgctgtgtcacccaggctggaatgcagtggcacaatctcaactcactgcaacctctgcctgctgggttcaagcaattttcctgtctcagcctcccaggtagctgggactacaggcatgcaccaccccgccggctaatttttgtatttttagtagagacggggtttcaccatgttggccaggctggtctcgaactactgacctcaagtgatctgcccgccttggccttccaaagtgctgggactacaggtgtcagccaccacgcccggacctctgaggcatttttaaaaattaatactgatacttgggtcctccctcacagagtctgatgtaattgcttcagtgtagcctaggccttgggattttaaaaggttaccctgggtgatttggacatctggccaatgttgggagccactgccgtcaccaataatggctcccctcctccctctgtgagtttccagcatctccattctctgaccgcttcctcctagcttctcagctcacccccacagggtctccatccccacattcttgggcctgaccattagctccaaccctctttctctgcaggcttctctgttccgcttccttctcttaaatcgcatgtgctggctgggcatggtggctcacacctgtaatcccagcactttgggaggccgaggtggatggatcgcctgaggtcaggagttcgagaccagcctgaccaacgtggagaaaccccatctctactaaaaatacaaagttggccgggcgtggtggcgcatgcctgtaatcccagctactcgggaggctgaggcaggagaattgcttgaacctgggaggcggagattgcggtgagccgagatcatgccattgcactccagtctgaaaaagagcgaaactccatctcaaaaaaaaaaaagagaaaaaatgtcgcatgtgactcccctgtccccagctgcagctacggtcttgcttccttccccaactcctggatgtttcctcatgctttatctgtctccctttcttctcacctcaacttatgatctggcttcttgtctcgggagaaaatggaagcagccactgtagaaattgcacctgttcctatcccagaccctgacattttatgtgcagctgactgcacacttttttttttaattcttaaacattttattttttattcaagtaagaaattattgattagcttcagttaatcccacaaagaaaatgatcaaatgcttaaaataatagagtttactagttctacaactgttctcactagcaaactagcaaatgagatgtgttggagatcttagacctattccatggaacagatagacaggttttttttgtttgtttgttttgttttgttttgttttgttttgttttgttttgttttttgagacagggtctcactctgtcgcccaggccgcagtgcagtgatgcaaacacagctcactgcagctttgacctcccaggctcaagtgatccccgcacttcagcctcctgagtagctgggactaacaggcccacgccaacacgcctggctaatttttctatttgtagtagaggttggatttcgccatgttgaccaggctggtcttgaacttctggcctcaagtgatcctcctgcctcgcctcccaaagtgctgggattacaggttgagccaccacgcccggccacaaatctggatttctgcccacctcactggctacaccttcccggcatccatgtgggggattccctcccttttgttggagagaacctataccacagacctaacctttgagcagaaatctgaaggaggtgagggtggtagccatggaggagaattccatacacaggccctgaggtaggcgggtgtctggcgggtttggggagcagcagggaagcccctgtggctggagcagggtgagtgagtagcgagtaggtggaggtgagggcacagaggtgacaggcagattctgtgtggcctaatgggctatggtaggaaaattggccttttctctgagtgagacagaagcaaggggaggtggctgaatacacttagccaatatgtgtctgccccctttctcagggctctggtttctgcctgccaggttcaagcctcacctccaggatttttggaaaatcatgtagctgccctggtctcctcatctctaaaatggatataacttacatcacatggctacacttagaagaatggctatagcatgtggggtcagtgctcaaagtggtagctgctttttttttttttctgaaatggagtatggctctgtcgcccaggctagagtgcagtgatatgatcttggctcgctgcaacctctgcctcccaggttcaagtgattcttctgcctcatcttcccaagtggctgggattacagatttcaggcatccaccaccacacccggtttaattatttatttatttatttatttttttttttttttgagatggagtctcgcgctgtcgcccaggctggagttcagtggcacaatctcagctcactgcaacctctgcctcctgggttcaagtgattcttctgcctcagcatcccgagtagctgggtctgcaggcacatgccaccacacctggctaattttttgtatttttagtagagacgaggtttcaccatgttagccgggatggtctcgatctcctgacctcacgatcgcccgtctcagcctccccaagtgctgggattacaggtttgagccaccacgcccagccagcctaatttctgttttttgtttgtttgttgttttttgttttgttttgttttgagacagagcctccctctgtcgcccagtctggaatgcaatggtgtgatctcggctcaccacaacctccatctcctgggttcaagcgattctcctgcttcagcctcctcagtagttgggattacaggaatgtgccaccacgccctgctaattttgtaattttagtagagtcagggtttctccatgttggtcaggctggtctcgaactcccgacctcaggtgatccgcccgcctcagcctcccaaagtgctgggattacaggcatgagccactgtgcctggctgatttctttatttttagtagagacagggtttcaccctgttggccagggtagtctcgaactcctgacctcaagtgatccacccacctcagcctcccaaagtgctgggattataggtgtgagccaccacacatggcctggtagctgctattcttgttaacattactgaaggggtgggttgcccctccacacctgggagtgtttctcgttaggtggaatgagagacttggaaaagagacatagagacaaagtatagagaaagagaaaagggggcccaggggaccgcgttcagcacacggaggatcccaccggcctctgagttcccttagtatttattgatcattattgggtgtttctcggagagggggatgtggcagggtcataggataatagtggagagaaggtcagcaggtaaacacgtgaacaaaggtctctgcatcataaacaaggtaaagaattaagtgctttgcttttgatgtgcatacacataaacatctcaatgccttgaagagcaatattgctgcccgcgtgtcccacctccagccctaaggcggtttccccctatctcagtagatggaacatacaatcgggttttacacgagacattccattgcccagggacgggcaggagacagatgccttcctcttgtctcaactgcaaagaggcgttccttcctcttttactaatcctcctcagcacagaccctttacgggtgtcgggctgggggactgtcaggtctttcccttcccacgaggccatatttcagactatcacatggggagaaaccttggacaatacctggctttcctaggcagaggtccctgcggtcttccgcagtgtttgtgtccctgggtacttgagattagggagtggtgatgactctcaaggagcatgctgccttcaagcatctgtttaacaaagcacatcctgcaccgcccttaatccatttaaccctgagttgacccagcacatgtctcagggagcacggggtaaggttacagattaacagcatctcaaggcagaagaatttttcttagtacagaataaaatggagtctcctgtgtctacttctttctacacagacacagtaacaatctgatctttcttttccccacacattactgataagaacgttgttgataggtaagattaccagtgtaggctgggagtggtggctcacccctgtaatcccaacgctttgagaggccagcgtgggcagatcacttgagcccaggagtttgagatcagcctgggcaatatagtgagacctcgtctatgtaacaacagcagcaacaaaatcttagcactttggggggctgaggcaggaagatcacttgagcccagaaattcaagaccagcctgggcaacgtagtgagaccccatctctataaataaataaaaataaaagcaaataatttaaaagaataaacattgtgaacatcaattcccatcacagcaagccctggatgaaaacatggacctcttggaaggtataactggctttgaagactctgtccgaaagtgtaagtccctctctgaggctgggctccccaaggggaaggggtagggagtggcagccaggtccggggggacagctgctcaccggttttgtctctgacctccacagttatctgccatgttgtgggtatcacttaccagcacattgaccgctggctgctggccgagatgctcggggatctgtcgggtaacgccctctgggtcctggtgcacatctgggaggttgggggtggctagggcagtggacctcagtcagctcctccaacaggcctgtctgggtctcatcaggtcagcatggaaggcccagcccaaggaggaaataagaacttggtataagacagtctctgccttgagggagatcctatgccatttgctcatttattttgcattaattgagtgcctaccgtgtgtcagtgtgctaaactgggcgtgcagcagtaaacaaagtgggatggctccaattcattctcatggaggtagcaaagcacatggcgacatggaggtgtccagtggtgattcctgtcatgaaggaaagcaagacagctcacagaccagcggcatctgagcccttacctccgtagagagaggcccgtggcctgaggtagtgcagaggaggatagtagagcagggccctgacttgtaacgttcatgggtagccagggtgtatgtggccagagcagagtaagcatgggcgaaagtagagagctgggggttggaggggcatttccaggtcatgtggggcctcgggaggaccttgtcctttcccctgactgagaaggagccaccggagggctctgagcagggtagggctctgatcagatggatattttttaaagatccccccaagaacaaaaaaagaaaaaataacttatttgcttacttttgtaaaaagaaacgtagaaaaggaagtcaagaaactaaggaaggccgggtgcggtggctcccgcctgtaatccagcactttgggaggccgaggtgggcggatcatctgtggtcaggagttcgagaccagcctgcccaacatggtaaaaccccctctctactaaaaatacaaaaaattgctgggtgtggtggcgtgcacctgtaatcccagctacttgggaggctgaggcaggagaattgcttcaacgcaggaggcggaggttgcagtgagctgagatcgcaccattgcactagtgataagatcgaaactccatctaaaaaaaaaaagaaactaaggaaggccacgtgtgatggctcataccagtgagggaggcagatcacgtgaggtcaggagttcgagaccagcctggccaacatggggaaaccccgtctctactaaaaatacaaaaattagctggacgtgttggcatgtgcctgtaatcccagctattcgggaggctgaggcaggagaaccgcttgagcccaggagcagaggttgcagtgagccaagatcacaccactgcattccactctgggcacttttagtagagaaggagtttgaccatgttggccaggctggtcttgaactcctgacctcaagtgatctgcccaccttggcctcccaaagtactgggattacaggcgtgagccgctgcatccagccaagtaaaagctaactttttttttttttttttttttttttttgaggtggagtctggctctgtcacccaggctggaatgcagtggcataatctcggctcactgcaacctcctcctggtttcaaacaattctcctgcctcagccttccaaatagctgagactataggcctctgccacctcgcccagctaattttttttttttttttttttttagcagagatggggtttcaccacgttggccaggacttggcacggtggctcacacctgtaatcccagcactttgggaggccaaggtgggcggatcacctgaggtcgggagttcgagaccagcctgaccaacatggagaaaccccatctctactaaaaatacaaaattagccaggcgtggtggcgcatgcctataatcccagctactcgggaggctgaggcaggagaattgcttgaacctgggaggtggaggttgcagtgagccgagattgcgccattgcactccagcctgagcaacaagagcaaaaactccgtctcaaaaaaaaaaaagtgtattgtttctggtaatggtcatgttataattttgcaaccgtttcatataggttgtgggaaaaggtagataaatacgctgctcttgttaggaaccaaaatttgcccagggagagaaaacagaggaatagaaattaaggcagaagccccacgatgaggctgaaagagctcacaggctccctctggcggccattcagagaatgacccgtggaagggcaggggcggaagcaaggagaccaggccagctgctgctgtccaggagatgtcagtgggcaaggggggctgccctggcttcctgagccatgactctgttgcctctcagtcccctggaactgtgggatcaggctgactgaagccccttgctgcccctgtcacctgcagacagccagctaaaggtgtggatgagcaaatacggctggagtgccgacgagtcggggcagatcttcatctgtagccaagaagagagcattaaacccaagaacattgtggagaagattgactttgacagtgagtggtgacccacggcctcgggctttggggctaagggggtgcccctcaagggaggccgaggcaggggcccagaggacctgggtagatctgctcgtgttctgggctgggaagtctgcacctgccagattccattcaccttgtgtcttggggctcccgcccaggaggaatagcggggagctgggtgatcttccctggaacttctaggccctgtgtcctgccccatagcactcagcaagacttcctggggcccagcggggcctcacagggggtctctgcacccttatttgtccctgaggcctgtctcgttggccatcttttattcttggggtgcccaagcctcatgtgcagacttggaatccggtgaacagtaggaatcttgattctctagtttgggtgattccacatttttgtgcctcagttttctcatctaaaaaatggggacgactgcaacagtaactatgataaacactgtgtaggtccttacacttacatcatttgatcctcagttgctaaatgatataaatagtatcatacctacctcatggcatcataagtgtgaatgcatgtataacacttagcaaagagctaagtgaccacacagttcattaaatgttcattatgaccatcgtctacacacatgtaactaacacaggctcaactgcttgctcaactaaaaagattgcagtggctactccggcagcgggtgctgcttcactgccgctcatcatggcactgagcagatgtcctggagccagggagaaaggcacaggcgggctgctgccttcatcccgggtctcccccacccgcttgagtgtgattcaggtgttttaaagatgtgtttggtacaacgtggtttcttaacacaaaccagctaattttgtacttaactggggaacagcattgagcaggcagccatctgcgcacttgcagcccgtggtatctcacctctaaacgccgcgtgactgctgtgtcggggttctcagtgagaactccagcaaaagattctgtagtgaggaaagggcctcctttcttctcccctttggcttctgttgccccaccccaccttcctgaccttttaggtcacaggtggagagggcagtgctgagtcaacaaggaaaaggaggaggaaggtgtgaatctcagggaagtaggagcccagccctgccgggggagtagacgggagggttccctctgtctcagttctggctccattgctctgtgtcctgggtcaaacaggataggttcaaaatactcaggaggctgaggcaggagaatcacttgaacccggaaggtggaggttgcagtgagccaagatcgctccactgcactacagcctgggcaacagaatgagactgtgtctcaaaaaaaaacttaagagtatcctgcaaatagtacctagtaaatattatcatgtaggtaattacaaacaacacttccttggcactttgttctaagcacctcgtttggtcctacaatcctataaggtaggtgcttcttaaagataggaaggtaggtgatgctcagagatgttcagtaacttgtccaagtgacccagctgttaattggcagagctgggatttgaacctagccctccttgctccagagtccatctttttaaaatactgcaccaaactgcctttgtgatggtaactggggcctggaaggagtttatgatctccccctaaagaattgtgggtgctgtagcaggtggctggaggtttgtctcccgcccttctcaccttcagtctggtctctccttccccacaggtgtgtccagcatcatggcctcctcccagtaacttcaggtgtttaataaagatgtgttgactcagccctactgtctcctccctggcttcctgcctctgccccttgcccaccagagggagctcaggagcaggcctctgctctgggttggcccccgcaccgtacccccagcccccaccacaccacaccccatggcggggtttccgcctcctttttcccctgcttcgacttcctcccttgccccaccctaccttcctgaccttttaggtcttgggtggggagggcagcattgagtcagcaaggaggagggagtatgaatgggatgtggcagcccagccctgtggtggaggctgagcacctctgggaggagtgaaggtgaagtttccctctgtcttgatggtggctcttgctttgtgaccttggtcaagggactgtgcctcttttttttttagacgaagtctcgctctgtcgcccaggctggagtgcagtcgcgcgatctcggctcactgcacgctccacctcccgggtttatgccattctcctgcctcagcctccagagtagctgggactacaggcgcccgccaccatgctcggccaatttcttgtatttttagtagacagggtttcaccgtgttagccaggatggtcttgatctcctgaccttgtaatctgcctgcctcggcctcccaaagtactgggattacaggcgtgagccaccgcgcccagccgggattgtgcctctctaattctcagtttcttcatctgcagaaggggaagaataatgcacccttctgaaacctgtgagggtttctccggcccttgccagtaaaggcctgagattggggcctgtcctgtcctgtccttgctcttagaaaatgtgagccacaggccgggtgcagtggttcacgcctgtaatcccaacactttaggaggccaaagcaggaggattgcttggccagagtttgagaccagcctgggcgacagagtgggactccgtctcaatatatatatatatatatatatatatattttttttttttctttttctttttcttttttttttttttagagacagagtctcactctgtcgcccaggctggagtgcagtggcgcgatctcagctcactgcaacctttgcctcccaggttgaagcaattcttctgcctcagcctcccaagtaactgggactacaggcacacacctccacgcccggctaatttttttgtattttagtagagatggggtttcatcgtgttgcccaggctggtctcgaactcttgggctcaggcagtctccctgcttcgacctcccaaagtgctaggaatacacacgtgagccaccgcgcctgaccaaaaagtttattttaaatagctaggcatggtggcgcgtgtctgtagtcccagctatttaggaggctgaggtcggcaaatcacctgagcccaggaggtcaaggctgcagtgagctgtgatcacaccactgcactccagcttgggtgacagaccctgtctcaaaaaagaaaatataagccattgttaatttcaggctcagaagtgtttgtcaccaaggttgcaagctagtcctcagtactattctgtatggagagacttcatgagaaaattagtatatatatattttttcctctcaaggtgtcataggtagacagctccttcagccacaccattctttccaagtcgcatgccgctcccctggttagtgttacctgacaggagacctgactcaccttacatgttcattcccttcttacctgaggaatttggggcactcccagtggcccttaggcagtgcttttcccctgtgagcatattgcctggagggctagggggttgggggaatgcaggaattaaaaagacccagtagaggctggtttatgcctgtaatcccagcactttgggaggctaagggaggaggatgactggaatccctctacgcaaaagtaaaaattagctcaggttgggcatggcggtccatgcatgtaattccaacagtgggaggctgcagcaggaggattgctgaaagccaggagttcgagaccaggtcaacaaagcgagaccctgttcctataaaagttttaaaattaactgggcctggccaggcacagtggctcacgcctgtaatcccaacactgggaagccaaggcagatggattgcttgacctcaggagttcgaggcgagtctgggcaacatggtgaaaccctgtctctacaaaaaactacaaaagaaaatagccaggcatggtggtacacacatgtaatcccagctactctggaggctaaggtgggaggatcacttgagcctgggaggcagaggttgcagtgagccaagatggcgtcactgcactccagcctgggtaacagagtgagaccctgtctcaaaaataagtaagttggccaggcgcggtggctcacgcctgtaatcccagcactttgggaggccgaagtgggcagatcacgaggtcaggagatcgagaccatcctagctaacacggtgaaaccccgtctctactaaaactacaaaaaaattaggcaggcgcctgtagtcccagctactctggaggctgaggcaggagaatggcatgaacccgggaggcggagcttgcagtgagctgagatcgcaccactgcactccagcctgggcgacagagctagactccgtctcaaaaaaataaattaaaaaaaaaaagtaagtaagtaaaaattagccaggcacagtggtatgtgcctgtagtcctggctacccaggagtttgaggctgcaatgagctatgattgcaccactgcacaccagcccaggtgacagcaagaccctgtctccaaaaaaggaaaagaaatgccctaatagatgttcattacttagagtagactggcagctgccccttggtgatttattgatggatgctggtgtgcataagcgttgccttggagagggcagctgtggtacccaagctgccagccggcctgacctccctgtgtgcactcacagccagcattcctcagagggccctgcctgtgggagcagacaccccttgccctggggcccagacctcagcagggccccagtagccagggagtgcctaaatcctggggactgaacaaaagtgtgcctctgcagctcactgggataaaaaggactgggaggcctggcacagtggctcatgcctgtaatcccagcactttgggaggccgaggtaggcagatcacctgaggtcaggagtttgagaacagcctgaccaacatggtgaaaccccgtctctactaaaaatacaaaattagccgggcgtggtggcgggcgcctgtattcccagctacttgggagggtgaggcaggagaatcgcttgaacccgggaggcagaagttgcagtgacccgagatcgcgccattgcactccagcctgggcaacaagagcgaaactgcctcaaaaaaataataataaaaaggactgggatgcctctaccacccatgaacttgggcacattagcaaaaggcaccccttctgggtggggacaactcccagttacccacttggcaggtgcccttatgcaggatacaacctgcacaattggccatggctgctctgcaagggaagaggaaatgacctttttcccctcctctgggagccacatctcatcctgcctcactgggctgctttcactatcagagggtcattcatactccgaacagctaggaggtggctctggagaaaaactgcctgagttcactccccagcccagccgcctcagggtatgtgagttgtcttctctgtacctgttttacagctggggaaagtagtaattgtacccacgtcagtagttaatgcctgcaaagagtttagaacagcttggtgggtgcagtggctcacgcctgtaatctcagcactttggaggccaaggcgcgtggatcatctgaggccaggagttcgagaccagcctggccaacgtggtgaaaccccacctctactaaaaatacaaaaattagctgggcttggtggcgggtgcctgtaatcccagctactcaggaggctgaggcaggagaatagcttgaaccagggaggtggaggttgcagtgagctgagatcacgccattgcacttcagcctggacgacagagtgagaccttgtctcaaaaaaataagctgggcgtggtgtctcactcctataatcccagcactttgggaggctgaagtgggcggatcatgaggtcaggagttcaagaccagcctgtccaatatagtgaaaccccatctctactaaaaaacacaaaaattagctgtgtgtggtggcgcatgcctgtagtctcagctattcgggaggctgagacaagagaatcgcttgaacccgggaggcagaggttgcagtgagccaagatcatgccattgcactccagcctgggcaacagagtgagactccgtctcaaaaactaataataaataaataaataataaattaaaaaatagccggggcgcagtggctcatgcccgtaatcccagcactttgggaggccgaggcggatggatcaactgaggtcaggagttcaagatcagcctaaccaacatggagaaaccccgtctctactaaaaatacaaaattaaccaggcgtggtggcgcacgcctgtaatcccagctactcgggaggctgaggcaggagaatcacttgagcctgggaggtggaggttggggtgagccgagatcgcgccattgcactccagcctgggcaacaagagcgaaactctgtcttaaaaaaaaaaaaaatagccaggcctggtggcgcgtgcctgtaatcccagctactcaggacacttgaggtgggagaattgcttgaacccgggaggtggaggttgcagtgagccaagattgtgccactgcactccagcctgggtgacagagcgagactccatctcaaaataaataaataaataaataaaaataaaagaaactcaaattggttctgtctccaaattccatcctggtgggtgcttgtcatgctcacttggggttcagggctgctgctccagctgcttcctgagacatctctagacattgcagtatttgttcatgtccccgccctgtgaggacacaccctctctagttgccttccctgaagtagtgttaacaatgggatacagcatttaataaattctgactgaggtctcacgggttcaatggtaaacctaaaaacgcctgtagggcccactggccataccccttctctcagagcccctcctggtcccttggacatcaatagacacatcagctattattactacactgcccatagatggctgccaggaagtagcctcaaggctgacaattaaagggaggctttaatttaaacttcaatggctggggctgtcgcctccatctgggagcacttggtctggacggtttctcagagtccaccaggagctgcagcgaggggcagatggcccatcccctgaggagtttttcccccaggccagaccatgcataagagtcctgagctagttcttcaagtcaggctggaggagaccgccctgccctgccccactccagcccagctctggaaacagccaacacgcctgggggtctttggccaggtcctggcatctcctaggacatcgggctgctgcctgggcctcgtccccttcctctgctgtcactggatccatcccttcgcgttcctttggcagaggcagagaagcagagaaggatccttgcaactcccatagctggagaaaccataaaccatggtggttggttttttttttttttttttttttttttgagacagagtctccctctgttgcccaggctggagtgcagtggtgcgatctcagctcaccgcaacttctgccccctgggttcaagtgattctcctgcctcagcctcctgagtagctgggactacaggcgcgtgacaccacacccagctaattttttgtatttttagtagaaacggggttttaccatgttagccaggatggtctcgatctcctgaccttgtgatccgcctgcctcggcctccggaagtgctgagattacaggcgtgagccaccgcacctggcaatattttattttatttatatttttgagacaggttctcactttgtcacccaggctgaagtgcagtggtgcgatctcagctcactgcaacctcgacctcctgggctcaagtgatcctcctgcctcagccctccaggtagctgggaccactggcatgcaacaccacacttggctaatcttttgtattttttgtagagacagggtttcaccatgtttgccaggctggccttgaacatcccatgcccgatgggatgatattttaaatcaggtgatccgggaaagtctcactgaggatgtggtatttccacagagacctataggaaatggggctgtgagccctagggactcagtgtctggggaaagtgttcctgggagtcgtgactccacctcacaagtacaaaggcctcatcagaggctgagtttggcacctggtgtgcttgagggacagcaaggtggggggtactcgaaggctttttttttttttgagacagtcttgctctgtcacccaggctggagtgcagtgccgtgatctcagctcattgtaacctccacctcccaggttcaagcaattctcctgcctcagccacccgagtagttgggattataggcgtgcacctccacacccggctaatttttgtatttttagtaaagacgggatttcattatgtcgtccaggctgttctcaaactcctggtgtcaagtgatctgcccgcctcagcctcccaaagtgctgggattacaggtgtgagccaccatgctagctgactctaaactgtttcataaactaggttgaggcagggcttgggtggctcacacataatcccagcctgtaatcccagcattccctgaggtaggaggatcacttgaggccaggagttccaggccagcctaagcaacctagcgagaccacccccacacactcccctcacccccaccacttgtctctacaaaaaatttagcaattgccgggcacagtggctcacgcctgtaatcccagcactttaggaggccgaggtgggcggatcacaaagtcaggagatcaagaccatcctggctaatacggtgaaaccccgtctctactaaatatacaaaaaattagctgggcatggtggcaggtgcctgtagtcccagctacttgggaggctgaggcatgagaatggcgtgaaccagggaggcggagcttgcagtgagccaagaccgtgccactgcactccagcctgggcgacagagtgagactccgtctcaaaaaaaaatagaaattagccaggcgtggtggggtgcacctgcagtcccagctacttgggaggctaaagcaggaggatcatttgggcccaggaatttgaggctgcagtgaactggaacggtgtcactgtacttcagcctggtgacatagcgagttgctgtgtcaaacaccatcaccaccaccagcaccaagaacaatatcaacaaaacttggctgagctggatgtggtggtacgtgttcacagtcgcagctactcagaaggctgaggtaggagaatcaagagtctgagctcaacttgggcaaaatattgagaaccctgtctccaaaaacaaaaaactaaaacactgggctggccgggtagagtggctcatgcccgtaatccctgcactttgggaggctgaggcaggcagatcacctgagctcaggagttcaagaccagcctggccaacatggcaaaacccctctttactaaaaatataaaaattagccgggcatggtggcatatgcctgtaatcccagctactctggaggctgagacaggagaatcgcttgaactcgggatgcggaggttgcagtgagccgagatcatgccactacactctggtctgggtgacagggcgagactccacctccaataaaaaaaaaaaaaggaaaaaaacactgggctgggctgggctgggctgggcaaggcagggcagggcagactcctctgcagcctttcttcctttccttgactttgactgttaccctgagcgtggagccacaggaaggtttgaacagaggagggaggaatgtgatctgactcagtcattcattcacaggctccctccagcttctcctgggaaagagaagggggtgggagggggagctgggagacagtggggaactgctgcaatggcccaagggaaggcgaggcgagggtagacagaacctgggtggcgcagtggggcagggggaagtgggtgggttctgtgtattctttcaagatggaatgacagaatttcctgaagaactggatggggttgtgaagacaaagaggcattaaggatgaccgcaaggtctgtagcctcagcaactgcaaggctggaggtgcacgaattgaagagggatgactgtgggatgggatgaccaagcttggggggaagatcaggaactctattttggatatttattattattattatttgagatggagtttcgctcttgttgcccaagctggagtacaatggtgcaatcttggctcaccacaacctccgtctcccaggttcaagctattctcctacctcagcctcctgagtagctgggattacaggcatgtgccactatgcctggctaattttgtatttttagtagagacggagtcgttggcccggctggtcttgaactcctgacctggggtgatccgcccacttcggccccccaaagtgctgggattacaggcgtgagccaccacacctggccggatatttatttatttatttttatttttattttagacggagtcttgctctgtcgcccaggctggagtacagtggcgcgatctcggcttactgcagcctctgcctcccgagttccagtgattcccctacctcagccccctgggtagctgggattacaggtgcatgccaccaagcccggctaatttttgtatttttagtagagacggggtttcaccatgttggccaggctggcctctaactcctgacctcgtgatctgcctgcctcggcctcccaaagtgctgggattacaggcatgagccactgcgcccggccatttatttttaatgtaaacatttttttgtagagatgagatcttgttatgttacccagtctggcctcaaactcttgggctcaagcactcttccagccttgactccccagagtgctgggattgcaagagtaagccaccagtgcctggctgaatatttaaatttaagatgcttcctgatgcagtggctcgcacctttgtttaaatgtctgccttctccatgaagcctacctgagtagtttatttgcattccagcccatgcttgatttttctccaaatactcaacaccttggaatatacaatactacctattttttacttttatgtatatttttgagacaggatttcgcttctggagtgcattggtgtgatcacagctcactgcagactggaactcctgggctcaagtgatgtcccttcctcagcctcctgagtagctgggactacaggtgcacacagccatgcccagtgaatttttacatttcttgtagagacaggttcttgttatgttgcctaggctggccttgaactcttgggctcaagccatcctcccgcctcagcttcccaaagtgctgggattacaggtgtgagcccctgtgcctgtctacatattttttaaaattttgagtgttgaggccaggcgcagtggctcatgcctgtaagcccagcactttgggaggccgaggtgggcggatcacctgaggtcgggagtttgagaccagcctgaccaacatggagaaaccccgtctctactaaaaatacaaaattagccaggagtggtggcacatgcctgtgatcccagctactcgggaggctgaggcaggagaatagcttgaacctgggaggcggaggttgcagtgagcccagatcacgccattgcactccagcctgggcaacaagagcgaaactccgtctcaaaaaaaaaaatttgtgtgttggttgggcgcggtggctcacgcctgtaattccagcactttgggaggctgaggcgggaggatcgcttgagctcaagagttcaagaccagcctggccaacatggtgaaaccccgtctctactaaaaaaatacaaaaattagccgggtgtggtggagcatgcctgtgttcccagctactcgggaggctgaggcaggagaattgcttgaatccgggaggcggaggttgcagtgagccgagatcgcgccactgcactccagcctgggagacagagcgagactccgtctcaaaaaataataaaaataaaagtagatttgtgtgtatgtggcttcctttactagaaggtagtttcatgaaagttgggatttttttctgtttttagtgcctgcgtaaaacatagtctggcacagaataggtgttcaataaatatttgttgaatttgtgtcgctgaatgggaacccggtgcagtgcattccaagcctgagctggttcaggtccgatggcggggcctgcccttatgaatcattcatgatctggccccgcccatacgcgaacgacgcgcgcgttcacgccggagagggggcgcggctcgcccccgggctgagtcgggcggccaggaagcgggactctgcgcaggcgccaagctccggagcgcggccttggtgccttttctggtttggcaggcgcgcgcgcgcgggagggcggcaacctcggcgctgtgcgcaggcgcggcgggcagtgcgcaggcgcgggcggagggcgggctgaagcagctgaagcggcggtagcggcggcggctcgggcagaggggcgggagctgaggcgggagcggacaggctggtgggcgagcgagaggcggcggaatggtggactaccacgcggcgaaccagtcgtaccagtacggccccagcagcgcgggcaatggcgctggcggcgggggcagcatgggcgactacatggcccaggaggacgactgggaccgggacctgctgctggacccggcctgggagaagcagcagcgcaaggtgcgcggcccgcgggccggacgggctggaggggcttttctgagggggcccggggaggggtgggaggtcctgaaaggtaactggagcgtctgtgatgggaacgggggggtcccgagaaggaattggcgggtccgggaagggaattggagtcctgaggaggaatcgccgagctagaggaaggaattgggaatctgaaaagagaattggcggctgggtggggaatatgggagtcaaataaaaggaatcgggaaggctgatgaaggatttggagggtctgggcgtgccattaggggaaaccgaggagatgactgggcaggctgaaatggaactgggatccgaggcgggcttgaagggtcggagcatgggttgggggtgctgggaggagaatcaggggaggctgagaagggaatttctgggtctgggaagtgtgaggaggagcttgagtgtggaggggttggttatttggagagcagaaagatctgaaggagattggaattgggggagcctcaggttgggggagttataaaggggatgaagaatcaagtgtgaggatggagtggagattgtggggtctgaagacgggtgggaagactagggaggctgggaagatgaaaacaggggctaagggtagaattgagcatgaaaagacatgggcttagggtgtgaggagggtagaggtgccaggactgggggtctgaggagggtggggtgcggaaggaagaagttaaggggcccgtgaatcagacgtttttgaagggggtgagatttatttgtggtgccctgttccaaaggggagaagattaagagataggaggaataataagaggaattgatgagggatggagaagccgaagtagaggggatacggagagtggggataatttggggagggatttctaaagaattgatgggaagctgaaaagctaaagcgttggagagaatgaggaagtgtagagggagaaggtgagatcggtgggagggagggtgagctggaatggtggataatgggagagaggttcgtttaggaaaatgaaagtctcattagaaagggaatgcgtaatggatagactgagaaaggaatttgaggagggggtgctggctcctggaggtgcagtcccgggactggagagcgtgtgtgtgtcgtgcaggcagaatgagtttggggaggaagcgttgagagtgtccaggaagaattgtgtcttttttggagagaccggaggtaggtgaagggatcctgaagcagagactgtgttcaggtggcactgtttttttggggggcggggggggcaacttggtagggccccacagcagtgaaaaggtgatcagaagtggagtgggatccccgagcgaggtgtcagtgtctgtgggggggggataaatccagtgtggttgaggggggagctctgagtgtgtgcaggaagagctaaagaaaggagcgtggtgagtgggtgtgtgtggggggaaggggttgttcagaagttttgtgcgtgaaatgggtgggaggtacttgaagttggaagcatttcgtgggatctggagatctggattttctttccagatttgttactgattcgctctgtggccttggacaagacccttgaactctccgggcagttttgttatctgcaaaatgcaaagggatccgagggttccctgcggtgattctgttaataaagagggatgtgtgtagagttgggactttggacagggctctgaaggtttgggagagtgagtttggtggagatttttcaggaacaggctacagggctttgagtggtgacctggcagagtggggagtgactggaagcctctcgagggcgcgagttggtggccaggagcttggcacaggcagcctagcccaggctggaggggaaagggtgggaagggtggaaggagcagctgttccaaggcagcctgaggtggggccgggcataaccttgggtccattaccagcgttgcttgaatttcctcatccgtagtaactgaggggcatggcagtggcttggtgggaggggtgtccttatccgtggccccacctactgcaggatggacaggttgcgatagttggcataaattcactttttgaggggaaggtgagatctgttctggagtctcaacaataatttattgcctgaggcagtgccaggttggaaaaggttgccaagagacctggaaagttgggagggagcaggggccacagtggtggttttgagaatgtctaggctttgtcttctgcagctgaaggtgctggagaaaataaacccctcccccttttttctcaggtgataagggtggggggaccttccttttctctcccttcctgtcttctgccactcctcaagtgactccttttgcgagccgggtttcactccctcccgagagttagggtgtgggctttgttcgtggttatagtgtcccttgcctacagggtgaggctggggcaccattcaggccctgggtggaaaccaggactccccagaacctccaggccttgctgccatgtgtcattctcttacctcccagctcccttcctctggggccgggcaggtttgagggaaaagggtggctcacagagtccgctaataccatctgctttcgtgtctcagccagagccagattctagtacctcctgctttacacctcctccagcaaatatttacccttagctgctctgtgggggaaactactgcttcacctctgtgccctttcctgttatggggtagggattctttttgaaatgggggaaggagtaatggaaaggaatacaccaatctgtgtggctctctaccttcctactaagaaacatccctgcactcccaggctggctgggttgtttgtttgtttgtttgtttgtttttggagacggagttttgctcttgttgcccgggcgtgatcttggctcaccgcaacctccgtctcccgggttcaagcgattctcctgcctcagcctcccgagtagctgggaatacgggcatgcgccaccacgcctggctttttgtatttttagtagagacggggtttctccatgttggtcgggctggtctcaaactcccgaccccaggagatccgcccgcctcggtctcccaaagtgctgggattacaggagtgagccactgcacccagactggctgggttttttctacattgcagtgttgctttagtgaatgacagattgcccttcttgcctctccaaggctgagccactgggcacgggaagaatgacagtcctgggggttctgtacatgcatactccaaaaaaatatgcatccagaacagctgtaggccctcaaagtgggtagaattgaattcttctaggaattaagcaagagttggcccaaatcagaggggacgtgtgtctcacttctgcttggaagccctttgctctgacttctagggacccctgtaacccgtaagtaggttatgcaacggtttttacatgagagggccatgagtgttctcctggcgggatggagaagcattgttctggtctttgagcaaattcttgagcaattacagttctgggccacagttccctctcccaatttctaaaagtggcctgggtaacctcatcaccctctgttgtcctggaagggtgagatctcttgaaggttatgccaaatctcattacagcaagaagaaatgactcacttgctaagttttcgtgttcattgaaacatcactatttcaggggcctcaatgtttcaaccctgaccgttggctttttttttggagacggagttttgctcttgttgcccatgtggctgtattaggtatgagttaactatttgaaagtttttgtttgttttttgtatttgttttttttgttttgttttgttttgttttttttgagacagagcctcactctgtcaccaggctggagtgcagtggtgtgatcttggctcaccacaacctcttccaggttcaaggaattctcctgcctcagcctcctgagtagctgggactacaggcgtgtgctaccgtgcctggctaatttttgtgtttttagtagagacagagagtttcaccatgttggccaggctggtctgaaactcctgaccccaagtgatccgcctgcctcggcctcccaaagtgctgggattacaggcgtgagccactgtgccctgccttgtttttcttgaagtagatctttttttctttttaaaggctgataatggaggccccaaagtagccatctgttactttgttccattactctaattgcttgcctcttaggatctggctaggactaacagttttcaaaattgagtaacacacttgacaaaaaaaaaggaaccaaactcaaactcaactgttatctagaaaaaagactgtgtaaatatgtgtgagaggcaagtatactctgtttgccctcttgtaagagggataggggaggccactcagctgctagcactctgttctctcccctcatcctctccagaatgtattttagaacttgactcttctaatgactgaagaaaaggtggggtatgggaagatggcctgggactgcagggtcacttacactcacctggctaagagttgagatctggctggtgccctggagtggcacctgccactcacctaatcctaaacaatccagggtgtgggcccaggattgccctctgccttttgaaacaccctccctggttccggcttctaagaccaacagggaggctactttggtggcagggagctgactcaccctccagttggaactggtgctaaaagcctccatttaacggcagccgactgcttggccccaagtgggctgccttgtgggggggaaagttcagtggaaagtgttggaggaagcagggtggtgtgtgaatatccaagtagtgctggtgctattaagctctgacacagtcagggaggtcagttaaaatgtggtcttatggccgggcgcagtggctcgcgcctgtaatcccagcactttgggaggctgaggtgggcagatcacctgaggtcaggagttcgagaccagcctggccaacatggtgaaaccccgtctctaccaataatacaaaaattaactgggcatggtggcaggtgcctgtaatcccagctacttgggaggctgaggcaggagaatcgcttgaacctgagaggtggaggttgcagtgagccaagatcgcgctactgcactccagcctgagtgacagaacaagactccatctcaaaaaaaaaaaaaaaaatcagatgacagaggggagcggggacaagttttaagtctaagcctcctgggtggggagttctgctgtttcaacatatgctccagtcatggcagactttggccagacagcgccctttttcagagtgaactgagtgtagcacaagttatctgccagtgctagttagcaaacagaatggagccaaaaaagaattgatttgggaaggcccaaggaatttgaaaccgttgagatgaacactttccgtttttgctacactgatttatgttgtgctgggaattgtacaagcctttgaccagaccttagggttgttctttaaaaaaaaaaaaaaaagattcccttgctgctgcttttacttttttgaagggcagaagggaagggcaaatataattagtgaacagctgtttgctctagtatcacttgctcgttcaggttttctgaatagctgaaatatcaacatgtttatctcttcccttgccttagtatatcctagagcagtgttttccccggctttatctttattccttcatttaatgaactccgtgttttcatcactcacattttgttcccttccctcagtttccttcctttgccttcatttatgtatttagtttacagaataacaaaagcactcgtgttacttttaaacaaggtaaaacttaaacagttttttcctccgtttctttttttatggaaataagaggcaagtgatagcaagtgggtaattcaatggcagtggtaactgaagcactgacctgttacaagagagacggaagcttctacttgagcagatacaaatactgtcatccgtggagatttgaaagaagtctttctatcactgggtagtttgagagctcattagtcttctttagaatgggtttaaacttggaaacatcaaagcaagttacaaggaaacttagttttacagtgttggcagcctaggcgccagaatttgttataaagtgtctgaaagtggcccaggtatcacttaacttttcttcaagaaggtctatgagttacattttactcggtatcccaggcatcaaggagtgtaactttcaatgaatcaaagagaaacagaatcattttaaattccagcctctgtttaaagaaggatcttatgaaggggagaaattaaccacctgacccagggaaggatcccgcctcctccagaaagtgaaatcgccgggtgtggtggctcacgcctgtaatcccagcactttgggaggtcgaggtaggtggatcacgtgaggtcaggacttcaagaccagcctggcgaacatggtgaaaccccatctctactaaaatgcaaaaaattagccgggcacggtggtgcacccctgtaatcccagctactggggaggctgaggcaggataatcactcaaacctggaaggtggaggttgcagtcagctgagatcacgccactgcactccagcctggacgacagagtaaggctccgtctcaaaaaaaaaaaaaaaagaaaaagaaaaggagttaaatctttgcatatatttaactggcaagagcatccttacatcagtgcatgggaagttttatccaagtagcagtttccctgggattataaaaatccccgaggcatttgtcttggtgttgtgcctttttttggttgtgttttttcacgtccctcccctcccctttctccataaacaagagaggcattaacttggaatgtccgtggaaagtcttagaagctgattggtgtaatttgcctgccttccctttagtttgaacagcgtttactctggaagaggtcagtggcctttttcttggttgtgatttatgcaagtgttatctgaaggcgagtggagtgagtttacgtgggatttgctgtttgccacctgttgttgtgctggctccttccttcctgggatgagttccattctctccccctcccccaggagtgaggctccccagccagagcagtccccctgtgcttatccccttccttcgtaaactgcagccatttgtgattttccataaccacttttatagacacataataatttcctttgaatcagtttgcattttaaattaagttttgaaaggaaaactgacaagagtatggcaactggaaaacccagctcccctggccataaatataatagaaggaaactgcaaaaataaacacattgaaaacaaaacagtgttgtttccaggtggttaccactcgggctgaaggccccccaggcttgaggcctgctccctttgttagaaagggattggcaagtgttggtgaggtgttaaagacccaccagcaccaagcagagactttctctttgaagtcatcaggtttacaagagaatcaaaggaaataactttctcaatgtgattcagggtgtaatgtaaggtgtagataacccttaaaattttccatgtgtgtatgtcacacttgggaaaaaaacttgatctcatctggtcgaggtgggcagggcagcaccttgtccaggagcacacagcccctcttggctctgtgtgtcatccggccatactagactcgaacatatggctcatgactggatgatgcttgattcatcttcagtttcaagtgttagtgcttttgaggttttgtaagaaaccaggacacattgaaaatacagtcatttctcagtatctgtgggggattggttccaggaacccccttatataccaaaatccacagatgctcaagttccttatgtaagataaaacgatgtgtaatttgcattttaactatgcacatcctcctgaatactttaaatcatctctagattacttataacctaatgctaaatgctacgtaaatggttgttacactgtgctgtttaggaaataatgacaaaaatatgtacatgttcagtgcagatgcaaccattcattttttttcttccagtattttcgatccattgttggttgaattcacagatagagaacccatggatacagagggctagctgtaagaaatgtgggtttatcatttgttcctcacacaacttttttctttcttcgtttttcttgcctttgttccttttttttgagacagggtgtcactctttttaccaaggctggagtgcagtggaacaatcttggctcactgaagctttgacctcgggctcaagccatccccccacctcagcttcccaagtagctgggactagaggtgcacaccaccacgcctgactgatttttgtgtttttgtagagatggggttttgctgtgttgcccagtctggtctcagcctcccaaagtcttgggattacaggtgtgagtcaccacgcccagccaactttttctcttaaggctccagttttcttcttagagttgggcccctcccacgaagaaagcacactgccaccccttcatcggatttgaaccctacattttgaaaggaaagcagtgccctcctgctgagttaacaaggcttatttaaatgtttttcttccaaatatcagagcagaacagattctttgtcttccagtggaactatccacatggggcagaagtagttggaagcggcagttactaccctgcagaacacaatgaagtcatcttgggaaatatcgtggatggtgttgcaatgattgaatgggatgctagaacaccagcaatacaatagcatttgtgtcttcagcttcaggcaggaataaagaagactttgtggtttgttttatgttttttaaagtttcccccccaaaggtgtggggctgagtgatgtctgtcactagctttctagtgggtttttcttttcatcttttcccctccctgatgtcttttgagagtgggtggaagccacagtctaggtggatcagaggaagcacagaaggcaggcagtataccccactttgtgttttccatgtctgaagggaacacatttggtttttgttctgttttgattttttagagacagggtttcactgtcacccaggctggagtgcagtggcctaatcataactcactgcagccttgaactcttgggctcaagggatctttcagcctcagcctccctagtagctgggattatgtgtgcaccaccatggccagctaattttaattttttttttttttgagatggagtctcactctgtcacccaggctggagtgcagtagcacgatctcagctcactgcaacctctgcctccccggttcaagtgattctcctgcctcagcttcccaagtagctgggattacaggcgcgcgccacgacgcccagctaatttttgtatttttagtagagacagggtttcaccatgttggccaggctggtcttgagctcctgaccttaagcgatccacccaccttggcccaacaaagtgctggggttacaggcatgagccactgtgcccgaactaatttttaaattttttgtaaagactgggtctcactatgttgcccaggcttttaatctgcaaaaagcccaagataaagagttttaatatcttacctcctgagtagtaatgactgattccagttctaataatgtcttaattacagctatacagattgaggggactgcaggaagtgaaatagatgcatttcttttttctttctttcttttccttttttaaatacacacttcgtttcggtggtgaaggccagtttgaggttaggagaggcatcttggaaggaagctcgcaggtggttcggcatctggacatgctgggaagttgcctgagggggacgtcacaataagaggactgtgggtctacagcctgccttagcaaaatgacaggccttcttttaccaaggccaagggcagtggtggaagctgacttcagttggtgtcatcaaggcctcagtatgtgtaacggttaacaaattactattctatgatcaatctccatctgggtgtgagtaaaaggtatttagttgctatcaccatggaaaccaagttgcttacttactgttttggggagtgccctcataccagaggcagtgctaatggtggagtgttaggccccgggcagaaaaaaagatcctgccacttggtatcacaggaaaatacctacaggcacagcagccttgccaggtaggggatgaaggccctctgtcctcggggcaggagttgggccagttgattgtgttgatgaggagtgtgcatttgtgcatgagagagggagaagaaaaaggagagcactccatgaaatccgctgctggctttgtagcctagaagagtgctttttttctctaggagtttggaactggaatctcagctatgtgacttcttaataataggacaaaatatgcctgtatcttttgcctacttccacaaacactgataaattaaaaagaactctaaatttcccacaaatcccaagcacaagtaactttttttttaaatccacatcctccctaatccaaatctaacagcaaatccttttctctctgtcactccctgcttttctttaagaaaatgagtaccttgccttaaactatatattggatgaaaatattaaacactttcacaaagtgcttctttggctgttactggtatgccttgcatttggaagggtcagagatttgaagacttctgtgatcttccagttctggcctatgaaatacagtcagtttcaaaattcaaaatgtctggaagagccaacttgccaggccggttcaagggcagtcagatgaatcgacccttcttacaggctgtctacgaaccagtcatgattcagatattcaagtcctggaaggtatccagacggtaaacatcaccaggattgtgaggcagttacttttttttttggatcgtttgagctacactgccaagactgtggtaggacttgtctgtgtaaaacagaaagggctgtctctaaatgtctttttcaagaatgtcggctataatcacccgacactgtgtctcatggtggggtgagatgaaatacctagaccggttaggggagggccttcttggccattttttgaactaattttccctttccctttgtaacttttttttcttcttttcttttctttttttttttttgagacggagtcttactctgtcacccaggctggagtgtagtggtgcaatctcggctcattgcaacctccgcatcctgggttcaagtgattctcctgccttaggctcccgagtagctgggactacaggcatgcattccacgcccagctagttttggtattttttaggagagacggagtttcaccatgttggccaggctggtcttgaacccttgacctcgtaatgcccacctaggcctcccaaagtgctgggattacaggtatgagccaccgcgcccagcccctttgtaactttcattaacactgatgaggcacaagccataggatagaattgaatccattgagagctgtgagccaattgagggatgattggttaatagattgtggcttgaagctgtggaaggtaaggggtgacacttgactcctattagccttgtagaaacacctcagagattcacaggaagcaaactttgaccataaaaatataagactcacagcgcaccgagttctcttagcagctaccttagagttgagaaagttttgggcctctttaataaacaagcacaaagcagttcttgccaaatacggcctgctctggggccacagggttagcttaggagacaactttcttgcctaaaaataaatgcatgttcctatcagacattccaagcatagtttaaacatgagacttctgagcagcagctcaagctctgtgggttcaattatgtcagagtatgggcagtgagggtctttggggagtgtgcccccttatttgggattggttgtggctaccaaggaaatcagatgatcaaatgcaaaacttcctccatcttatttctatatgatcttttttttttttttttgagttggagtcttgctctgttgcccaggctggagtgcagtggcaggatctcagctcactgcagcctctgtctcccagattcaagctattattctcctgcctcagccttccaaatagctgggactacaggcgtggccatcatgtccggctaatttttgtatttttagtagagacagggttttgccatgttggccaggctggtctccaactcctgacctcaggtcatccacccgctttggcctcccagagtgctgggattacaggcatgggccaccgcccccagccttatttctacacgttcttgatctatcacaggctggtgggggagacagcatgcatatagataatgaacaaggtaacttcagataggattatgtgcaataaattaaataacagctagcattttaccttgtgctagacactattctaagtgcttcccatggactgactggtttttgtttttttttctttcctttgagactgagtttcgctcttgttgcccaggctggagtgcaatggcgtgttcttggctcactgcaacctccgtctcctgggttcaagcaattctcctgcctcagcctcccgagtagctgggattacaggcacgtgccaccatgcctggctaatttttgtatttttagtagagacggggtttctccttgttggtcaggctggccttgaactcccaacctcaggtgacccacccgcctcagccaccccaagtgctgggattacaggcgcgagccaccatgcccgacccatggactcacttgtataatcttgtgaagcaggtgttgttacccttacatgcagaaatggatccatgggcctttaagccacttgcccctgtgacagtgccaggatttgaatgtagaagttgaggctttcaagtttatgctgttatttctacactacactgaagtctagtgattgggaatggctttgcgagcgggtggtgaggggaggagtgtgcagtgcaggtacttcagatggagaggaaggtctcaaagaggtggcatttcagctgttccttaacggatgagaaagagagaaccaagagagcaccagaggaacgcgcttccaacagagaaaaccaagcaagggggcccccgaggagcagaaaggcccgagtggtcagagcggagcccgtggaagagatgggcacagccagattgcttagagctgtgttgttagaagtgctgatgagtctacattcaacttgcgcctgcaaactcagtccctcttagatgccagtaggtcaggaacctcatgcttccaggactctggcgctcctaccctttcctcccaggcctcctggacaggccaaaccagaactgacttctaaagtgggaaccccaagacggcagaacatgaatcagccaaacaaaagctgcagttatctctgtgatgatttcggcagtcggcacgtgtatttgattaaagcgttggtaactttgaatctggagttttatggcactgtgtactactcataatggctttgtagtgtggctctcttagggagcttaacttttacaacatgaacaagttccagcctcctttggtcccatcaagaggccatttctacctggtgggatgccacttgctttacaaagcatcttttgtaaaatgttgagtctccttctttgaagttggaagccaggaagcctgattttttttccaataagtattgtagaagatggcagcctgatttatttttatttatttatttattttgagacggagtctcactctgttgcccaggctggagtgcagtggcacaatctcggctcactgcaagctccacctcccaggttcacgccattctcctgcctcagcctcccgagtagctgggactacaggcgcccgccaccatgcccggctaattttttgtattttttgtagagacggggtttcaccgtgttaaccaggatggtcttgatctcctgacctcgttatccgcccgcctcggcttcccaaagtgctgggattacaggcgtgagccaccgcgcccggcctggcagcctgatttttaaactggcttttctcctaggtcctttccttctctataaatccctctttcacttagtatttcctccttgtttcctttggtcagttggagtgagggtggttctagttcagagaaagagacaggcatacaggctgattcagtctgaggtgcttagctttctgtacctcactggaaaccagtccaggaatatgacaggtttcagtaggtttcattggacccacaactccccatttgaaggcagagcttgtcaaacgagttatgtggcttttactcaaggagggaggaacagcaacagggagctctgggctattgatagacactcctgcctctgaacacacagcacccagcaagaagttaccttcatgggttgtctagagtgaacatgggctgggattctctcagccttagcactgatgatttgacaacaaaaatcgccccgtgggtagagtataacggagcaaatgattatggtggcctgtgatggtgcagccagcccagctgcttcagctggaaagaagatggcgaggtttccattctcctggcagcatagccatgtgaacttgttaaatcttttaagtagctgtataggaggggagataagtgtgtgtgtgtttattcttatccccttaaatacaaaaacaaaacttccactttataaaatcaattcagagtgggaagaggtgcatggcacatggaaaatgtgtcggattaggttgagtcctaccccacgtttgggacacagctgtaagtttccatggtgggtggcttattatgcatttatgctgagctgaacctgctccaagctgctgcagataggaaagtctgtcttggagggggagctgcctctttctatcacactataaagacataaaaggtcctttgaaagactccagcagtcaccacttgggtaacagaattaggggctgctgagcaaagtgggtctgtttttttttttttttaaagacagagtttccctcttgttgttcaggagtggagtgcaatgtcacaatcttggctcactgcaacttccgcctcctgggttcaagtgattcttctgcttcagcctcccaagtagctgggattacaggtgccggccaccacgcctagctagttttttgtatttttagtagagacggggtttcatcatgttggccgggctggttgtgaactgctgacctcaggtgatccacccgcctcagcctcccaaagtgctgggattacgggtgtgagccactgcgcccggccacattttatagccaaccggcttcttgtgtaacatgagttggggcttcttgggccccagagtccagcactcaggtagaaatatgaccgccatggccagacagcagccctcgctgggcccctcttcagagcagagctctgtgccgagcctttaggggtatgagagaaaccggagacctggtccgtgctctcaaagagctcgcggtgtagctggggagagagcaaggccacatgagacctcagaaggacactaaacggcacaccgacaagctcacagcactctagctgtgtcccgggagaggaaaggggtgaatcagggcaggtggggtcagtcatggaaactttcataaaggaggtgagtgtgcaggaggggcgggcctttgcccccgctgcgggcaggttgccgagggcaagtattagggggtccggcgtgcaatcgaacatttcttagctgcctctttggagtagcgctaccagttcctgtccccatgagcatcgtcttcggggagctgctggtttgaaggatgaggtaccatgctcatcttggccatgtcttagaacctgtgatagccagacctgtcgttctgggtccgtatccattcatgcgtcctgtcactgtcacagatatcgtgagtgggccagactcttctccccaggtgggagggggtgccttctgaggcatatgttttcagcctgctgatggcctcttcagaattagcacaggtttcgacaaaaagaatggagagactcccttctcatgtccaagggtctccccaagccctgtgtctcagcccctcagggcgtgtggtgctgcacactgccgcccagatgaccacgcgcagccggaacggccgccctgtattgagaagtgggatcggctcccagtctgctggcgaggctgggttgccacagctcctctgttgccctgcaacgcgggtggcctaggagtgtgctgccttcagtttattcctgcctgccaagctacgcttccaggtgctattcttttctttaaataactgccttagtgctgcttgtggaacttagcgttcccatcccaggaaatactccagtgttgtgtttttttttttaaactcattcagatgctcatggccaaatgtgtgacttaaataccgcagtgtccttgatattgccttccccacaccgacaaaccgagttgcattctggtcccactgtgggataaggttagggtagcggcgcttgcctctttgtgtggtttcagatgtgtttctccccacttcagataacacatgacagctgtaatatagctcagttcgtgcaagtaaggtaggggcagaaatcatccaggagaactccagcctccatcctaaaggattagactgcctagcatcagtaggtttaccatagaaggattcagtggagatagcgagggtggtgagtgttgctggattgagcccgtccctgcagcctgggcacgggagcactgcagtgccatgaaggagagggctgggggatattagcacagccggttcctatttccttttccacctggttaagacttccggggaggccctgcccagcagtccttatgagatgctgccttcctcttttttgaaaggcatagatgataaggaggtggacatgttttgagaagagaacctagagctcattacttgtatttgaggcatgtattgcttcactcccactttgggagagttttttctggggaagttaaaggctattcaggatcagagagtttcctgcatggtcccaggggctgggaggagccacctgctcagctggtggttagctgatagcacccagcctacccaccaagataggaggcagctcagatgtcactgggattcgcagtaccacaggctgtccctgggcccaagcagttagctagctgcaccccgggagggggtgttgagagcactgaagctcctgtgggagagtgcctttgacatcccccactccccactgcccagaactaggaggtagtgaaaggtgtcagtggcaagaaggctgggccagagcatggagggaggccgacctgggctccacacccacctcctccaccaccggctggctgtgcgaccctgggcaggtggcgggggttaagcctcagtgtccttctttgaaaaggggcatcatcctatcctcagtttgaggattagacgtgatagtgcgcaggaagcactctggtgcctggtacattgtaagtgctcaataaatgcagcttcccaaaatgatttcaatggcacatggtcctgcatccaggtgggatctgctacttgagtctccccctcaaaggggcctgctgaaatacgcagctcagtgggaaaccaaaacatacacccctttcctccagtgctccccaggaagcgccaagtcctgagcccagccagcaacttcgaagaagtgccctccaacaagtggcagtgggcacttgagcaagtgacttaacgcagccctctccccagcccctgcatccatctgggcctcattatctgggaggtggcttcttgtttcagagttacaggccctgaacaattttgtgttgggatgtgccataggcagtgccaggaaggttctttcatgagtaatttaacttgttactaagtttgctatcagccggggggctctttccccgggttcccttctttccctgggtccccttccccgcaaagcaaagtccaactcaagttagaaacatcccacagcctggagtcaggctgccctctcttcagttggtgtgtgatgtagaagcaggaagggcttcccactgataaccctaaaaataactgcccagaaatgctgtcagatggggccaagaggtgcacaggagcctgtgcccagctgccgacctggaacgtgggactttctagagggcttggaggagccctgccccttccaggcctcttcccaacagtgcttctcacgcctgctgctccattcccttttcctccttcctcccgcgcccccccctttcctggggtcacttcctgatgccattcttcaacttcgcccctgtcccccccaaaagcaatcaaatccacaacctaataaggcaaaagaatgaggagaatgtccgcctcccagcctctcccctaacagggtgcaggcctgaagcaaatttggaaaatgttacaacggagtgacaaccgatgggggctgggggtggggcggtgcagccttgttcaggagctgcccattgttggcctgaggcaggaccctaagggaaggccacccggtttgcgctttcctgatcaggctgttgacacccttctagcacaagaaaatgtatggaaagtaactgcctgagtcagctgcatctccagttgtgggatccacgtgccaggagaacacgaagtacacacaggtccgcagtgggagcccgctcggagacacctccccgccatcacggctgggactgtgcatatccaaacacttcttgcctctgagatgagcagttttcttccccttgactgtgccagggttcaattagcctgggcattaattaaaacttgtcaacacttagagtggggcccccagaaatctgtcacccctcctagatcattatcccaggctaatcaaccctctctaaggcagtttccattcttgacttagtgggagggaggaacaagcccctcggtgctggggagctctgggggaggtagggactgactgggcccaacccactttgttttggaaggtcaagcttagtaattaacctgaatgcttgggggagggggtgaaggagaaagaactgagtctagggatgtgccaggtctttcaaattgctaattatcagcgagcatgaggtcatccgtaaatatatctaattctttagcttgtaattaaggtgctcattaaaagtgcagggaagtcttgttttcctaaaaggggaaaaaaacaacaacacaaaaagtctttgttttgacctgacacgatggctcagaacagggggaggactcaaggcacaggactagtttcctgccttaaagagcctttacaggaaattgactgcaaacagtattggtgaccctgccaaggaggcaaacctagggtgatgtcattgttcgaagctgtcaccgccaagcctctggccttggggcgaggagagttggtgggattaaaaaatgagtgtgtgtatgtgtgtgtgtgtttagcagtctctaaagaggcgagtcaagggaaaatcctagcgggagaaaaatcacaaggggtggggggtgtctcagaaatattcttagctgggttcaactttcctcgtttttctaagtttaaaaaatcctctcttactatttttgctcatcaaaatgctgctgctttttcagagacagccttttttgagccattccctatttagtgttttgggtaattggctgttacagtatggaatttgtggcccaaaggcagcgtggtaagttagacactaggtgcacggtgccccattgttatgaagtgtggaaactgagacgctggactagtctgatgtatctgtttcttccaccaaaaaaaaaaaaaaaccattttggagaactacccaatgccagtgacttggcatctctgagtcgctaatcttcccatgtgcctccaggaaccgtctggagcgtccctgaaaaaaggacaaggtttgtatcttgtcatttttcctctggctggaagtctaagaggtataaacacagtcttaaaatgaaagcaacaaaaataaactcaaagcagccctgcgtgaaggcattaatgcaaaatatgcaagctggcttcctatttatacggcggaaggcagtcagaagagccaggcctggttaaggaaggagttatgtctctggaggtgcctgttccttagaattacaaataaaccctgggtgattactcagatgaggttgtaatgtggtgtctcatttcatgctttgcacagtccagtttcttgatggaaccaacggcctctgaaatgctaatgcaggatcaggatacagttagagtgccccccttcctgtgcccctcctaacatcctaacagctttagaaggaagtttgaagattaaacaggagagccatgtaagtttcctgtgatcctagatcctgtgatttgttaatattctttctcttcaatccacctgacatttacccagataccatattaggcttggagatacaacaagaaagaaaaccaacccaaccctgtccttaaagaaaagatggacgatgaagggccaggcgcagtggctcactcctgtaatcccagcactttgggaggccaaggcgcacagatcacgaggtcgggagtttgagaccatcctggccaacatggtgataccccgtctctactaaaatacaaaacattagctgggcatggtggtgcgcgcctgtagtcccagctactcaggaggctgaggcaggggaattgcttgaacctgagaggcggaggttgcagtgagccgaggtcgtgccactgcactccagcctggcaagagagtgagactccatcgcaaaaaaagaaaaaagaaaaaaagaaaagatggacaatgaattgcatgatggaagtgaacagtgttagggcgatatgcagatgtaaatgtggtcttgttttactgctcactgacttactgaagtaaacccattgacttcgccttcatgggtttgaaaagggtttttccaatgtgctctgtgtgtctcggagctcaggtgttcagagctgcctcccttataaatcgacctccaggagagttgtgtgtttggttcttggtgtatggtttcgtaggctccccagggctgaggagtcaccttgggatccagctttttttcttttttcgagacagtctctccctgtcgcccaggctgaaatgcagtggtatgcacttggctcactgcaacctctgtctcctgggttcaagcgattctcctacctcagcctcccaactagctgggattacagacgcctgccaccgtgcccagctaatttttgtatttttagtagagacggggtttcaccatgttggccagattggtctcgaattcctgacctcaggtgatccactgccttggcctcccaaagtgctgggattacaggcgtgagtcaccgcgcccagccaaaatccagctttttcttagttcctggcttggggcatgttgctggaaaggaatgacagattgaggcaagaaggaggcaagaaggatgcatctcctggccaaggaaactagagtttggaggtgtcccctgtcaatggcatctgaagaatttctacattggaaaggcataggtgacccagtctggtttggagtagatgggactgggtaggggactagtcttgaagctgcaagcatgctgtttttacttagagcacaggtagctggggaggagatcactgtggtgtgggtggcagaagccatccctagccatcacctaggaagatggtggcccttgggttgcccgagctgctgcttgttttagtagctgcatttggtgccacatttttgtggtaactgccaggaagcggagcccagcgtggcctcaggaagttggtgaggtttgcaccactttttaacaggctggtaacagtgccggagctgacaccctcatggttgcagccctgggattttgttatttggggacactttggaatatgtcactcagaatgctggctcactagctccacaagcaaaagactccttgggtagctggaagcaagcgttgggggaaggagggagaggcaattgcagtccagccaagaatctcaaggctcagtcttcaatgtatggaaacttcagtccttttctgatctttagtggaaatagctgttcactcttagcgccaattggaaagtgttggcagctgaagggggtcgttcctcaggggtccccagagccagtgtatctggtatttctaacattttcctagccacccctttctcctccatatgcccctcccagccccaccattcagatagggtggctggaaagaacatctcctaggtcctctaggaaacttggtgtttccactcaagggagttggggatcacgtaacaccctccacttccacctgggatttcaggccatctgtgggagtgcaagagcatggtggggtggaggtcacaggaaggtggaagcaaagccagggcagctccacatgcagccccctttcaggaacagcaaggataggccggcctgtatcttgttgctcagagcaggtgatcctgtcatttggacccttgtgaggagaatggatgtgagtgtgcacctggttctcttctcctggggctgagggactgtggtcttggattatcacatggtaggtgaggtgacaaaatggagggaagtagcctgggtggggactggggtggccactgcagagctctagctgatggtggccaggtgggaatggggacctgggacttcacgaagctggaaatggagagttttatggggcatttcattcaacttaaaaacctggccgggtacagtggctcacgcctgtaatcccagcactttgggaggctgaggagggtggatcacgaggtcaggagattgagaccatcctggccaacatggtgaaaccccatctctactaaaaatacaaaaattagctgagcgtggtggcttgtgcttgtaatcccagctactcgggaggctgaggcaggagaatcccttgaaccagggcgtcggaggttgcagtgagctgagatgtcgccattgcactccagcctggtgacagagcaatactccaacttaaaaaaaaaaaaaaaaacctgcaggccatacaaaatagggcctattgggtgtgaagagctacccatttgtgacccctaaccttgcatggtcttgaccctgtctctgcctctcctctagtctcccctttcctcttgtctgaattgctgctgcttaatcctctcactaggagcgagaaaattgtactttgccccttagtgacagctctgataaaaggtggttgaagtggatggtagtaaaaagggtttgctttagctgtggttttccagcctccggactcctccccctttcccatcaccatagataattaagagttgactcctcaaaattcctcccaccatattgcatatttttaggcttcaggtttttgtgaaccaaaatagtggaaagtttttttgtttgtttgttttgggtagcccaaagcaacacttttctacagaggcagccattctgcacgcacaataacctggtgaacaatgccagctttctattaataaatgaactgccagttcagaatttgtacccatgtggcagatggacagaaatagtttctttaggattgatctcttaaatttgactttgggaagatactggcagtccaggttttgtgacagagatccatcctgagatctttgtaaatggaaaagcctgaatgcagcgtttcttattgataggagagttgatggatttcaggaaaatgggatatagtagatgtgcaatgaatttgttgacttggaaacaaatttggacacttatccctgaaaacttcaggccattttttcctaaactctaattgagtccctgtgattggagtactagccccacagtccttatcaaacttcgcatttggagcaggcagtctgtctgggaaaagccaggaagctcgccatgaaggcatcgccctctgcttttaacttttttaggctctgttacctctgcactggcttgagtatttcctggctcaattgtttctcaggctggccttgagtccttagatgttatttgtgtgcctagaaatagctggaagaaaaatggttgtaatgctttgcattgctcactgctctccatggatggaaattctgtgagggaaagagggctttccacccagaaaaagagctgggcagcgtagacttcattgtcctgctggcctgtcatgttattctgctatactacagcgattaggatgagagagtttctcgctctccctgggtgtgccacctaaggtacattagggtagggacgaacatggcgggagttctcatagtgggctttcctgccagacgtatggcccacacagcagtatttcttacatgtggttcttttttttttttttttttttgagacggagtctttctctgtcgcctaggctggagtacagtggcgtgatatcggcttactgcaacctccacctcccaggttcaagcaattctcctgcctcagcctcctgagtagctgggaccacagatgcatgccaccacacctggctaatttttgtatttttagtagagacgtggtttctccatgttggccaggctggtcttgaactcctgacctcaagtgacccactcgccttggcttcccaaagtgttgggattacaggtgtgagctaccacaccctgccaaggttctattatttgatctatgttctttgtttgtttgtttgtttgttttgagatggagtttcgctcttgttgcccaggctggagtgtaatggcacgatctcggctcaccgcaacctctgtctcccgggttcaagcaattctcctgcctcagcctcctgagtagctgggataacaggcatgtgccaccacacccggctaattttgtatttttagtagagacggggtttctccatgttggtcaggctggtctcaaactcctgaactcaagtgatccacctgccttggcctcccaaagtgttgggattacaggcgtgagccaccatgcccggcccctgtaaccatttttaagtgattgatcatctcagcatgattgatggagatgatggggttggccatccattcttttttttttttttttttggagacagtctcactctgtctccaaggctggagtgcagtggcacaatcttggctcactacaacctctgcctcctgggttcaagcgattcttctgcctcagcttcccaattagctgagattacatgcatgcaccaccatgcctggccagtttttgtgtttttaatagagacagggttttatcatgttggccaggctggtctcaagcccctgacctcaggtgatccccccacctcagcctcccaaagtgctaggattacaggcatgagccaccacacccggcctattcatcatttattgagcatttatttatacccactatgtgccgtaaacaaggtgctgagtaatgagatgtgaacagaatagtccttcttcttgtcctcatggagcacacagcctagtcggggacaataggcattaaaaaataccaacaatgaaaacccaagacatacatagagtgttccaaattgtggttttattttttatatatatatattcatatatatttatatatatttatatatatattcatatatatttatatatatgaatatatatttatatatattcatatatacttatatatatttatatatacttatatatatttatatatattcatatatatttatatatattcatatatattcatttatatttatatatattcatatatatttatatatatttatatatttatatatattatatatatttatatatttatatatattatatatatttatatatttatatatttatatatacttatatatatttatatatttatatatatttttatatatatatatttatatatgtataattttttttttttttttttttgtgatggagtctctatcacccaggctggagtgcagtagcgtgatctcagctcactgcaacctctgcctcccaggttcaagcaattctctgcctcagcctcctgagtagctgggattacaggtgcctgccaccacgtccggctaatttttgtatttttagtagagatgggatttcaccatcttggccaggctggtcttgaactcctgaccttgtgatctacccgcctcggcctcccaaagtgctgggattacaggcgtgagccactgcgcccggtgtgattatttttatgaaggaaaagaccagagtcctttaagaggggacagtgggggacttgcaatagattgtgtgggagctgtcaggggagactttccaagatgatgacagtgaagtgaggcctggagggagagttagagccaacctcagagaagggaacactgttctaggcaggaggacccagggttgtgggaagagagaaataaaatgagaccaagacagtggggagagcagtgtgagttgaagtcagaggggtgacagcagccagaatgtgccggtagcgaggatcttggattttattctagctgcaatgagagctttgattctacaaatatttattgcgtgctagtcactgttttaggtactgggtgtacaacagtgaaaaaagaacttcccagccgagtggaatgccgtggagcatatctgtttcgatgctgggacagatccctaacacagctcattaaagcagatagcaccattccgtctctttcttcagcttcactttacgtcagtcccagcatttttatccctacccttacagatgagagaactaaagttcagagaggtgacgtgacttgccccaggcccctcagtcagtaaaagacagaactgagaatccaaccagactcttccctttttaggttatttctctaacattagggccgagtatcgattctctttacctctgacttcgtgtccctggtattaagactcagggcccacagtgcctcttggaattcaggcatatggtgacatcagtgtgcctaccattcaggtcttggagaatagggtatggcgaaaggagagaactcgtgatatcgctgattcagtagcccagagttgtacgagtccttgggtgtttcaccttcatccaggcatctgagattggagacaagcatgtggctgaatgacgtatctgggggaagctgtctaaacagccgtgtggagttggagagttgaattagctctgtggccaaacctctgggctcagtctgcctatatatggcttgatctcaaagaacaggtgatagcagtaggagttgttttctgtgttgctggtgggagatgcccaggcacattcctttgtagacaagcacaaactagatatttttgaaatcggaggtctgaaaccagccgaagaattaatcctggcctggaaagcatatgggagagtacagccaacctggcttgggtgttgctttcttggttttgttgcatttttgaggcagggtcttgctctgtcacccaagtgggatcacagtggtacaatcatggctcattgcagccttaacctcctgggctcaagtgattctcctgccttattttttgattttttttgtagaggtgaggtctcaccatgttgcccaggctggtcttgagctcctgggctcaagtgatcctccaccttggtctcccaaagtgttaggattacaggcgtgagccgctgcccctggtgactttgttgctttttaataagcccagaaatttctttcaagagggaggatctttgtgaacatcttgagccgcgttcttgatcgctggctgtggaagcctccacctatcaggctcaagtccatgttgctatcatgtgcactttggctggtgaggtgctgagcagaggtttcagcctctaccacaaggtttcctgatgaaaggtcagctgggtgggcccagcttctccttacccaactgagaggcctcatagagcacaaggcctgggtacggaggttcctggggctcctgccatacccagccaggccaagcagagggccccagtgtgttgttgggtgctgagaggctgcccgcagctctcgcctgtgttggaaggctgtagacttggcttctcccaaacgtaagctgtgaagccatggactcagattctcagcctggccctgctacttactgtgggaccttgggcaaggaagtctccattttctcttttacaaaatggggccaataatctgactaccacagggctgtcaggatgcagcgggatggagcctttatagggtcttgttctgtgggatctggagtcccatatgggagttattagttgagggacgaggcatctgggaatctttattcaactaggaaacttcagccaaagaactaatgccatagagatgtcttatggtgtctgcatttgaagccagcggttctttgaaaatttatcctgagttccagaaagccaactgctagataagtaagcattgagcatttaaggggtcctggaagtaagattcctggaaagaagcagcaatctcttactcatccccgattatctcagacacagagtggtggatggaacctttgtggtttaggggctgactcttggtattgctggataaggaatatgagccagtagagacgagtgtgttgtatagcagtgtcctgcgactgggctggagacgtggctgagggaggccagggggcctcagagtgcacgggaggaggcttacagaggtcttttgcatcctgcagaacaccacatgtgtccttccctctgggaaacctcccacccgggcagggcctctggggccggatgtggaaggtaaacaggctgcctttctgctctctaccacagacaggcccggaaaggcctgagtaggagcttttcatctcaggaagccctgaggtcccacagcttctcctgaagcagcctcattgtccctttgtaagagcatgaccaggtgctctagctcctggagcaccagtggagaactagagtggcccaggtgctgatgccaagttcgagcaacagctcctggcgggtttccctgcatccccccactcactcccatctattcttcacataggggccaaagaacatcctgcttgacatcttgatcagtgtcccttgccctcaggatcaaacctgcaagtccccaaggccctgcaggatctgttttctcctctctgtgctccgggcgcatgccagctgcctctctgctccatgctcattcctgcctcctgagggacttcacacggggcccttgcctctgcccctttcgcctcagctcgccacctacctcctcctcattcttcagatggcagtttatgcttcactatttgtagggccgtcgcacctgacacctccagcctaggttaggagcatgtccatcacctctacttctccttttaactccaaccatccttggctctccctctcgagggtcacgagagcagagagagaatctattttgttcaccactgtgtccctaccatgtgggacattgtcaaggcaaatgtaagtgtgcactaaataaatatgtattgaatgaatagatagccaaacagacagaatggatctgccacaacacaaacaggatgcttttcaagtgggcagaagatggagacatcacttgtcgagacactcaaacaagtggctggatggatgagtggcagatccattctgtctttctgcttggctttaggagtagagggatcacccatggtccatcctctgaggacaagggtatcatgaccgcccaggccccactcacccctgccaggctcattgcatcccatctaaaagtgtgctctggaaggtcataagaagtcctcacctgggacacttctaggcccagtgttcagccagctgtcctgagttctgcatcagtccctgctagatatgaaacacaaacaggatgcgatgcttttcttttttttctttttcttttttgagacggagtctcgctgtgttgcccaggctggagtgcagtgggtgcaacccctacctcccgggttgaagtgattctcctgcctcagcctcccaagtagctgggattacaggtgcacaccaccatacccggctaatttttgtatttttggtagagacaatgtttcaccatgttggccaggctggtctcaaactcctggcctcaagtcatctgcctgtctcagcctcccaaagtgctgggattacaggtgtgagccaccgcgcctggccaaacaggatgctttgcaagtaggcagaagagggagacatcactgtcccatggagaggtgggaaaatcatcgttagcacaggataattcatcctattttgtgctcatgtttactgagctaggattgacctgtgtccgggcagcagggacacagaggtgagtaagacaaagagaaggcccttgcccttaaaaatgatacgtgtggctaaaacgctgtagacctttttgttttttcctttttgagacttcctttttatacagaaattgctacctgcaggtaaaattaacttacatcgtgaaagcgacagtaaagtgtttctagggatagctaaagacctaagaacacagccctgtggtttgactggctggccaccttcctgcagctgggtttactatggtgctgtgttctgggacagcccactcgtctccatttattgggctgagcctcgagacctgcaataccagggaaggaagggaagtctaggctgtctttggtggccattgttatttatggggcatcggcagagaagtcagtaccatggaaaatctagagaaagatagaggatacgcagtgtggttgagcagaatctgatagctccctggctctctccgggccatgggacccagggcgacacagccaccctttttctctctgctgtctggcttgggcttgggctttgtctcctgtgtccctccacaccttcttcgctgtcagtggtgaccaatcccgtggaatcagccactgtgtgttaccccaagtccttgcccctgggacctcgctctgttcggagacaaaacccgggactgtttctccttttaaatgcaaccttgttccacaggagaggagaaaagcaagaaagaggtggcttgtttatctgatggtagtggggtgtgctctgatatgcctttgaaaggggcccagctttgctttgcccagcggcctttgcaggataatgagagaaggaaaacacagggaacttagtgggaatttgaaactggagtgtgggagtgggaaagttcagcttttaccttggagcaatccagtctttctcctgtaggaaaacagaatggtgctgtatggcctccaagctgggttacatcctgggaaaaagacacgtgcttggctattggcctgggcgcagtttatgtgtaagcctttccttgtggattccattttcttatttcccgaatacttctcagccccacaagtccactgagtcttctgtctccagagactgcctggtttccatccccgagggcatctgcgcatcacttaccatggtgtaccatgcacctccagtgtgcccggcactgtgtcaggagctggggatacaggtgctggtccccacctcactcccctcaacctctgcaatatatgatacataacccacacacacagaccatatgcaaaagtggtgggactcctttgtacctgtcacctgcatcagtgattatcagcattttgccagacttgtttcatcagtgtctcccaacacactccccccagacattacccatacgtgctcaaatagatttgggtgtgcgtgtgtgtgtgtgtgtgtgtgtgtgtgtgtgtatttttttagagacagggtctcgccctgtcacccaggctggagtacagtggtgagatcatagctcactgcggcctctgaactcctgggcttgctttgttgcccaggctggtctcagaactcctggcctcaagcgattctgccaccttagcctcccaaaatgctgggattacaagtgtgagccaccgcacccggccaatgtatgtatttttaaacataaccacatactgttatatttaatgcttctgaccatgtcttaagaaaaaaacaaaaactccctttggcttccttgacatcacagtctctctgtttctctgactcttcttcctcatctcctatggctaaattctctccctctgtccactgcttacacatgggcatttcacaatgtcctttttccctgaaggaacttaccccctcccctcagccttaagtaccccatctgtggggatgatgcccatgcctgtagtcctgactcactcaccacgctctatcgcagttatttactgatgcatctctctcccctatcagacgctgaggtctttgatggagcaaccttgtatttgtccgtgtatccccagcaccacacctgtccatagctggagctcaggaagtttttttttttttttttttttttttttttttttaaagtcagagtctcactcagtcgcccaggctagagtgcagtggcacaatcttggctcactgcaacctccacctcctgggttcaagcaagcacgtctgggtaatttttgtatttttagtagagatggggtttcaccatttggccaggctggtctcgaagtcctgactgcaagtgatctggccgcctttggctcccagattgctgggattacagacaggcatgagccactgcgcccggcctcaggaagtagttgaatgagtgactgaatgaatgcccacgtgagcaaatgacctgtttgctgaactttagactgacgttgcctgatgcccactgcttgtgcagtacgtacttcagtctcagcgtgtctgagaccaaactcattttcaagtcccacttcttgggcttggcattgcccatttgtcagccatccgagtcagaaaccttggagtcagcttttgacttctcatcctgtaacaggcaccaagtttgatttctttcccttgaatatctcttagaaccctcaccttcctccttctctttattcctaccattgtccttactcaggaccatatagtgagggtttaaaagtgcagagtcttggccgggtgcggtggctcacacctgtaatcccagcactttgggaggccaaggcgggtagatcacctgaggtcaggagttcgagaccagcctggccaacatggtgaaaccccgtctctactaaaaatacaaaacttagctggatgtggtggtatgtgcctgtaatcccagctactcaggaggctgaggcaggagaattacttgaacccgggaggtggaggttgcagtgagctgagattgcgccactgtactctagcctgggtgacagagtgagactccaatctctagaaaaaaaaaaaaaaaaaaaaaaaagcagattctaaactcacagtgctgctgctggctgcctgagcttgtgtggctttggacagatgacttaaccactctgtgaagatggtatctgatgcacaggaaatgctccaacgttggctcttgtcgtcatctgtgcccatgtctccctcagcagcctcctgactggccttctccagtctcctggtttggattgaggctccctagaccctacctttctgagactggtatctagtcaggttactctgggagatctccaccccccactgcccagagagcaggttctgagctcttcagtctctccaccttctggccccggctgacaccatccctgccacttctcctggggtccccaaacatctgtggtacttttgtctttcttgcccttggtgttcccactctgcagaacaaccttctctccaggtcaccactgatcgcaatcgcgctctcctttcaaggcccagatcaggtgtcacctgacctttgctgtcctcagatcacacctccctgtagcgactggctcgccagtgtccctctctgaccgagctgtgcactcctccagggcagcactgtcagggtctcccccagacccttggttgtgattctctctccttgtcctgaatctcagttttcctgatacatgggatgctacctgaaggcaggtttcaactttcaatctttttttttgttttttgggtgagatggagtcttgctctgttggtcaggctggagtgcagtagcgccatctcggcttactgcagcctccgcctcctgggttcaagggattctcgtgcttcagcctcctgagtagctgggaccacaggggcctaccaccacacctggctaatttttgtatttttagtagagacggggttttgccatgttgaccaggctggtatcaagctcctggcctcaagtgatccacccacctcagcctcccaaagtgttgggattacaggcgtgagccaccgctcctggcctggaggatttcagatttaaagcaaagaggatattttccaacaaagcaactgcttttcttttttctttttaaattttgtttatttatttttaataaagatgggatcttgcatcttgcccaggctggtctcaaacttctggcctcaagtgatctgcctgcctcagcctcccgaagtgctgggattacgggtgtgagctaccatgccctgtctctttttttgtttgttttttttccaaattgaaacagggtctcactatgttgcccaggctggattgaactcctggcctcaagcagtcctctcgccttggcctcccaaagtgttgagattagaggtgtgagccaccatacctggccctgtagaggggaggcattgatgaaggtcaagaagtcctgttagctctgccttcagaatctaccccaggtccttttagttctctccagcctcactgctggaaccctcacccaagccaccaccttgcagtccacacacggccactgggattggggcggcgttctccgcgcgaaatctggctgtgctcctcccccatgaggccctccaaaggcttcctcttcttaggatgaaacccacactgccagccgaagctcctcaggctcccaccctctacaagctccttctgctccagccacactcaccaggcccgagttcccacctagcaccttccctgggaatgatctccccctggttggctctttctacttattcagcctcaaatgtcatctccactgagaggcctttcctgacctgctgagcttgattccctcccctccccagtcacattactccgtgttatggtacccatccctgtctccttagcttgtttttgtctgtattggctcttccactagactgtaagttgcatgagggcagggatgtctgtttaatcccagtgctcaggatagtgtatggctcgtgatagatgcctagtacattttaaaatgagaacgaatgaagtttgggagaggctcagagcagtgagtctcccccttgttgggggactggggagtgcctgggaggggctatctggtgccagcggtttggagtggctgggatgactctggaatcctgtgaggcccagtcagtttctttggttctcatgcagtgcagtgccctcagacctaaccattttgttccgtgctggcttgaaagggtctgcctccctcccagtgcagcccctgcctctcctctttctcgccccccgccctcctccagagaaagcaggtggtgagggctctctaacccagacaggacttgctgttcagccccagcttgaaattgatttcctccagccctccttgagccaggccccgtgaacagaggaggggtctgagccaggcctcctaggccattggtgggagggagaatgagacagccatttggcccacaggccaccaacttttcccccccttctctaaaagacacacaatggcagttgggctgcacctttgtgagtcaccggtgatagcccatcataaattgttatttcctatatttccagagcagctttatcgggcgttgcctgtgcagtccgggaaccgatttggtatggggtcagttaacatgctgtcttgttgaaatctgtcatcatgcccatataaggcaaactccttggattactttttaccttggcagaatcacaggaatgtcaaggtaaccaggccacctcagcatagctctgattctcacccggtcacctgacttgcccgccctcccccatgactcacccagtggctcagcatggggcctgctgcactgtggctgctggaatctgccaaggacctcctgggactgcccttggttttgtgtcttccttagagtagatcaaatgagaggaaccatgtgaagtagctcacacagggcctaacagagcaaacacaagacgtggaaagcagacttggtgaggcttgagtttagtttgggggttgcgggggtcccagctctgctgcttaacagccctgtggccatgggtatatcccccagcattcagagccttatctgtaaaattagagcacgcagaacaaaccctggtacacactaagtgctcaataaatgtgagtcatttgtgtaattatagtagggtaggccttatgccccacccagtcataaaaatgcctcttgctgttgttggttcaggctcagccccttagtggctttcatggggcaggttgacatggtacccagagtcctcctcggtcctcttcccatggtgtagtgagagcactcaggaccacctaggcctttcctagaaaactgaacccacaccttcccagtgctgccccaccctggtcccccaccccctgcaggacaaaccactcctcccttgttttggggccaggagtcagatctgcccctgagagcagcaggggcccctttgtcctttgacgtcatacccacaccgctcctggagacagccaccccttcatgccagccccaggaaggcttgtaggtggggcgagccagggtgagagtgtagccctgttcctcggccagggcagatgtttcaccatttttaatggagcaattatgagtcagaggtttcagtctctactggttcctcccgatcctataattactctttggctatagaatcctattttgatctcttcttttcttttctcttctttctctctctgtggtcatggtcaggtttttctttttttaaatcctcccaagacactgctaatgttgtctgtctcatgcatccaaggaatctgagatggactgaatattgtcaagggaaaaaaaaagagacccccaaatccagagtgatttcttaacccacccaaatggctttttgtttgtttgtttgtttgtttgagacggaatctcgctctttagccagggtggaaggcagtggcgtgatctcagctcactgcaacctctgcctcctgggttcaagcgattctcctgcctcagactcccaagtagctgtgattacaggcacatgccaccaagcccagctaatttttgtatttttagtagagatagggtttcaccatgttgaccgggatggtctcgaactcctgacctcgtgatccacccaccttggcctcccaaagtgctaggattacaggtgtgagccaccgtgcttggccaacccacccaaattgtgtaccctacaccatcctagtgcttgggagccaacacccactcacaggaggctaagggcaagtttaggtaactcttaacaccacgaattagttgcctgctggcaaacttcaaactccaagcctgaaatttctggttggagtcacctcccagatggactcagggattcattcaccccctcatccagtgctcacggagcctctgtgaggtgcaggcctggagaggagccctgtggcctcagcaaagggcaggcaggctggtgagcacccaacctctggatcgaggggactcaattatgcggataaaggcccctaatcctctcagtgctccaaactcactctgcttctgaaagggatcttcgtaccctgggttcagagagtaggaagcccgcagggaccgagtatgcatgaaacaagcccaagtctgtgggggctgtacatggtcaagatcacagatttccagaccaagccagctccaccctagctgggatgcccaccctgagacacccctctctgctttcactggaataggatggccctgacttggccgggtggactgttgaatcagagcctctcaaaacaggaaaaaggaaaaggatcaccaagcaggagtttcagttgtcaaagacaaaacccttaccacgattaaagattactccagggcctcgcatattcacccttccaccagcagggcccagtttacggatcatttgaatactagcaaaaaaacaagccatctgctggagagattgaacagagggagaaacaggagtgtttgccctgcttccagacacccctttcctgtggcagttcctgcacctggcaagatctactggggaattcccggggtcccactagctcaggacgggtgtgtagcacttgcctaaataacaatcccatcagtgccctgtctgaccttttctccccaaatgccaaaggcctcttgtctggatgaacaaatccctgggcggatttgtccagactaaaacgttaattctaaagactgggccccttaggcactcgctaagattccaggccacactgtctcaaggccagaattggcttacttggctatctttttgaaagatcaaagtttaaaccagatgatctgtagtcccccacccccaccctgaaacctgagcttagctgtaagcattgaaagtaaatggggtgtttgtagctcaccctccctgttctccaggtgaagggccccgtgtgcctgatcatttcatagcaaaatgctagatggggccagaggaggccccagcctctgctgctgccctaattttaaaactgccttttgggagtgtaagtttcctctgttaaaggtagttatttcaaggtaggcctcaccatctcctcctcctggtgagaagctctgcctggagggctgagcactgcctcccgctctgtgggccccacctgccttgggttgagacctatctcttcctggactctgtgtggggagtgcaggctcttccccttggggagaacccagttctttgacgtataatctgagtggtttgggttggttggttggttggttggttggtttcccatgtgtgggatggctccggaagtctgtttgagaacagaggcaggctcagatgggagcagctcctaccccgggccgcctatccccctttaccctggggtttcttttagctccaagcatccattccagtctaacaaatctggtggcagagtctcttttttttttttttttgagacagagtctcactctgttgcccaggctggagtacagtggcacaatctcggctcactgcagcctccgcctcctgggctcaagcgattctcttgcctcagcctcctgagtatctgggattacaggcgtgtgccaccacgtctggctaatttttctgtattattagtagagacggctggtctctactaatagttcaagacggctggtcttgaactcctgacctcaaatgatccacctgcctcagcccccccaaagtgctgggattacaggcgtgagcccctgcacccagcccctctggttctactgagacctcagatctttcatttatggaacaagggggttggattagattgttcgctctcagccctcacttcatgttagactcactaggtggactttgtcaaatgtcattgcccagggcccaccttgagggaatctgtctcattttgcctgtggtgaaattcaggtatttttaaaaagctcccaggtcccatacatctattgtcaattgattttcaacaagggtgcaggaccattcaatgggggaaagaatagtgttttcaacaaatagtgcaggaacaactattaatagatacccatctgcaaagaatgaagttgaacctttacctcacaccatatacaaaaattaactccaaacggatcagatacctaaatgtaagagctaaaactgtaaaactcttagaagaaaacacaagtgtaaatctcatgaccttgggttaggcaatggttattagatatgacagcagaaacacaaccgaagaaaaatagataaatcagactgtttcaaaactggaaactttttgcttcaaaggacactattaaagtaaaaggacaacccgcagaatatttacaaattgtatatctgataagggtctactgtccaaaatgtataaaggactcttaaattcaacagtaaaaagacacaccagttaaaaatgggcaaaggattcaaatagacacttctccaaagaagatctacaaatggtcaataagcacatgaaaaggtgttcgatgtcattactaattagggcaaatcaaaaccataaccactacaaatggtcaataagcacatgaaaaggtgttcaatgtcattactaattagggcaaatcaaaaccataacgtggttgggcctggtggctcatgtccataattccaacatttttggaggtagaagtgggaggatggcttggggccacgaattggagaccagcctgggcatcatagtgagaccctgcctctacagagaattaaaataaaaaattaggccgggtatggtggctcatgcctgtaatcctagcactttgggaggccgaggcgagtggatcacctgaggtcaggagtttgagaccagcctggcaaacatggtgaatgaaaccttgtctctaccaaaaaaaaaaaaaaaaaaaaacccacaaaaattagctggacatggtggtgggcgcctgttgtcccagctagtggggaggctgaggtgggagaatcgcttgaacctgggtgggagaggttgcattgagccgagatcacgccattgcactccagcctgggcaacagggtgagaccctgtctctaaataataataaaaatgagaaattggccaggtgtagtagcatattcctgggaggctgaggtgggcagattgcttgagcccaggagttcaaggctgcagtgagctatgatgacaccactgtactccagcctgggcaacagagtaagaccccaaccctaaaacaaaaaaaaacagaaaaccacaatgagataccactgcacacccaccatgatggctataatcagaaagtcagataataagtattgactaggatgggagaaatcagaaccctcacattgctggtcaaagtgtaatgtggtgcagcttcttgggaaaacagtctggcagttcctcaaaatttaaacatgttttgtatttttagtagagacggggtttcaccatgtcacccaggctggtcttgtctcagcctcccaaagtgttggaattacaggcatgagccaccacgcccagccaagttcctcaaatttttaaatataagaggtatcatatgactcagcaattttactcctaggtatatgcccaaggcagttgaaaacatgtccacataaaacttgtacatgaatattcacggtggtgctaatatccaaaagatagaagcaacacaaataatgcccatcagccaatgaattgataaataaaatgtggtatatccatacaatggaatgttattcagacaggaacgaagtactggtacatgctacaacatggctgaaccttgaaaacatgctaaggagaagccaaactcaaagatcatataccatatggttccacttatatgaaatgcccagaataggtaaattgcaagagacgaaagaaaggtaggttagtggttgccaggggctgggggctgggtaggagggaagtggggttggagagtaactgtaccagttttgcggtggtagacatgttccttgtatttttggttttttgttttgttttgttgttttgagataaggtctcactgtcgcccaggctagagtgcagtggcgctgtcatagctcactgtagcctcgaattcccaggcttaagtgttcctcccacctcagccttctgagtagctgggactacaggcaagagtcaccatacccagttaatttttaattttttttttctttttctttgagatggagtctcgctctgttgcccaggctggagtgcagtggcgcgatcttggctcattgcaacctttgcctcccgggttcaagcgattctcctgcctcagtctcctgagtagctggaactacaggcgtgcgccaccatgcccggctactttttgtattattagttagagacgaggtttcaccatgttggccatgagagacaggactagctggatttcctaggccgactaagaattgctaagcctagctggggaaggtgatcgcacccacctttaaacaccgggcttgtaactcagctcacacctgaccaatcaggcagtaaagagggctcattaaaataccaattaggttaaaagcaggaggtaaagaaatagtcaaatcatctatcatctgagagcacaggaggagggacaatgattgggatataaaccccaggcatttgaggcgggagtgggccaccccctttggttcccctcccactgtatggaagctctgttttcactctattaaatcttgcaactgcacactcttctggtccacgtttgttttggcttgagctgagctttcgctcaccatccttcactgctgttcaccgccatcacagacccactgttgacttccacccctccggatccagcagggtgtctgctgcatttctgatccagcgaggcgcccattgctgctcattcgggctagaggctcgccattgttcctgtgcggctcagtgctcgagtttgtcctaatcgagctaaacactagtcgctgggttccatggttctcttccatgacccacggcttctaatagagctataacactcactgcatggcccaaggttcaattccttggaatccgtgaggccaagaatgttaggtcagagaacaaaaggcttgctgccatcttgggagcagccactaccaacttgggagctctaagaacaaagacccaccggtaacagccaggctggtcttgaactcctgacctcgtgatctgcccgccttggcctcccaaagtgctgggattacaggcgtgagccaccttgcctagccttgttctggaattagtggtgattgttgcacgatcttgtgaatatactaaaactccctgaattttatgtaaaagggtgaattttttggtatgttatgtgaattacatttcaatttttaaaaattgattctccaaattatgtacatatttaaagagtacatgaaagagagggagagaaagaaaagctggatgcgagatgccgcaacctgattccactcactcctagatttgttgagtacctgctatgtgaaaggtaccagtccaggcagtgggttcccacagcaaacagaaccctcctctggggagcttatgctgcacttgggagggagactggttatgaacaaagaacatagtttttgatgatgaaaagtgcagtgagtaaaacaatgcagtgtgaggccgggtgtgttggctcacgcctgtaattccagcactttgggaggccgaggtgggcggatcacctgaggttgggagttcgagactagcctgaccaacatggagaaactccgtctctactaaaaataaaaaattagccaggcctgtaatcccagctactcgggaggctgaggccagagaatagcttgaactcaggaggcagaagttgcgttgagctgagatcatgccattgcactccagcctgggcaacaaaagtgaaactccgtctcaaaaaaaaaaaaacaaaaaaaacaaaaaaaaaaacccaacaacgcagagtggagtgatagcctaggggagatgacagagtccaggaaggcctcctgggttgctgacatttgaggcaagtcctgagtgatgagacaaaaccagctctataaagagctagacgaaagtcttagaccagtatttctcatgaggaggagacagcactccaaaatccatcctttggcctggcgcggtggctcacgcctgtaatcccagcactttgggaggctgaggcgggtggattacctgagatcaggagttcgagaccagcctggccaacatggcagaaacccgtctctactgaaaatataaaaattagccgggtgtgatggtgggtgcctgtaatgccagctactcgggaggctgaggcaggagaatcacttgaacccgggaggtggaggctgcagtgagccgagatcatgccaccgcactccaacctggcgacacagcgagactctgtctcaaaacaaacaaacaaacaaaatccgtcctttgcagcagcaacacgcacgctttctggcacctcaaaggggattgtccaagactggaacactggctgcagggagggggccgggtgcaaagagctggtttctgggtggacacgcaggacctttggaatgctcgctaccccactcagcagtatttatacctcttctccaactgcgaagtcagagctttttcatgcaggctgagaaaactccgaataaggcaacttcaggccaggacataagacgcattccatatttcactgtaattgctttcaaattaggttatgtcgtcatgtaacaggcacacacagtgcacttgctttgcccctggctggggttgggtcctggacaggctgccccgtgtgtcgctgaactgccgcagtgctagccctgattgcctgggcagtagggctgtctgcgtcccacgttgctgcacccatctaatttgtggctgtgttattgtgacctgctcgttttctgttctttcaacctgcttcctggcttttatctccttcagaatctggtggcagtggatcttcaaaaagtgctcaggtgtgcagtctcacaggccagaggctccacgggcccccttgccagggcgagcatctctgcctgtgccgctggtaacccagattccagaaggcttagccgtctggccctgaaagcgcctttatagttggtgatgaagcccatgggctggggagccgtttctgctttcaggaactgaaaagatgccccagtggggctaggccttgcctgaggtctggcaatagcctgccagatgggtgataagaaggcctacccaggtgataagcctacccaggaataaatagctgtacctcccctgtgtccaagccctggacacccttccctaggacccatggaagcaggaaccatgggcagcgtcagaggccacagcaggcaaggtggaagttcaggaggtgggacggcgccctccccctcaaagcaactgatgccccagcggagcgacaaaccctacacggtatttcagagccaaggtttgaaaactcccagggtgctagggagctccgtctggcctccgggtacctggggttggggctggctgtggccagttgcagtcaaccctgagcctgggcaaaatgcatgcaggctggtcctcctgggtgatatcctgctaggcgggtgggcagtgtacacggcagaagagggttgcggcatgaggcagcaaacgtttttttctaaaatcttgtcaagcgtggggtccgtggaatccacatgtgagcatcagcctggtgggtggggagagtgaagcctgcgatccagtctggatcatgtgctacacagtgcagagccggcatgctcacccctcctgagggatcgctcgagcctatttctaggcccaaagcgactttgcaagagactccctttattctgggcttagtggaattccagcttccaacagccatttccctccacccccttcagttctgagaacatgttttgtaacaggaaggcaggaagaaaagagaaggcgagtttgttcagctgggtcagccgcatcccaccaaggccctttcttccctccagctcaccatcgctctgcccactggaaccactcggttgccctgtgtctgccgaatgtttgtttcttaatcagcgccccagagtagagagggctttgcctcttcgggttgagggagggaatcattgatgaatggctcattaaagcccactgctgccacattcctgggtgcttaggtcacctcctgaacaatatccatcattcattcacctaccgccccacatcctggcggctgggaggggtccctgtgacgcaggaaggactttatgaccagagatgctaggtctccgtctccctcctgcagcccacagtgacaaagcagaaactgctcttggggccccctgaagcccgccttagctgggtcaccatgggccttggcacacggaggggtgacagtggatcccaactcaactgacaagcttgcctttctctgttcttccaccccccttccccgcactcacaccctgtgctattttagcaaccagagaagcctctttaataggctgcccgtgtgcaggggcaagctctgaagcctcctctctgtggtttggttcacatgtgttctcaaagacagatgagtccacatccttccttcctccctagataggtcaagggctgggtgcaggctgccttcacaggagggccagggacaggctgggaggagcggggccaccttttgcgaagcgggtgatctgctggggcgttgctctgcctgcctgccttgttctctgagtttacctctagcttggggaccaagggtgggctggggccttctttttttttttttgaaaccgagtcttactctgtctcccaggctggagtgcagtggcgcgatcttggctcactgcaacctctacctcccaggttcaagcgattctcctgtctcagcttcccgagtagctgggtttataggagcccgccaccacgcccaggtaatttttgtatttttagtagagacgaggtttcaccatgttggccaggctggtcttgaactcctgacctcaagtgatccgcccgcctcggcctcccaaagtgctgggattacaggtgcgagccactgcgcccggccctggctgggggcttcttgacctgactctgctgtctctccctcactggccagcacctcccattctactcagacatcgtggaatgaatgcccaccccgtgtttgtatgtatcatctgtgtctgtgtgacattaagcaagtcactgaacctctccctgcctcagtttcctcatcaaatggagatatatcgcatgtgatcatggggttggaggttttaaagagttgctaatgtgtaaatagtaagaactagcaattagccgttatagcataattacctttaatatgtcatgccccccgcacccccgtgctgaatgtaattttgcgggggggcgggttgagacagggtctggctctgtcaccgaggctggagtgcactaacacaatctcagcttactgcaacctctgcctctcaggcacaagctgtcttcccacctcagcctctcgagtagctgggactacaggcgctcagtaccacgcctggctaatttttgtagtttttgtagagatggggttttgccatgttgcctaggctgatctcaaactcctgtgctaaagcaatcctcccgcctcggcctcctaaagtgctgggattacatggtgtgtgccaccatgcctggctggccagaatgtaaatgataactgttttgcttcctcctgtgtccagtacataatagggctccaagtcagtatttgtgaggcaggtgcatgcctcttagttgcggtcctgagggcatggccactgccacgttctggacagtcagagtcgctgctgcccctggaagatgaccgcgatcatgaagcccaggagagctcgatgctttttgcctttccctcctcccacagagggctggcagctctggttcctcccaaatgaaatagaaaccttgagtttgcatttcttctttggcgtgccggcagggcacctctgccttcctcttcctgccagggggaggaagtttctctcaggggctcttcaccctgctttattcctggccatcacacattgacccttgtccccttcggctctttccctgcatggcagggacagcatgaccgtttaatggctttgtgaggccagcatgccagcctcacttctttactcccttccttctcggagtgggctctgtcccttctgcaggagggctttggcacatgctcttcccagtatctggaaggtctccctcatttttatcttattaactcctcatccttcagctcagagtttgagaatgacttcttcaaggacacctttctgtgtctgcctcaccagtcgcttggtgcccccccaccccgccaccatgctgaccgcactcttcagctcccatcccaggggaggtgacacaaactcggccccaggagcccagcacctggctttaaacccagctctgtaactttctaggtgtgtgactgatgggagcaagccacttcacctctcaggccctccgtttcctcatctgcaaaatggaggcagtactagcacctccctccagagatgattacgagggtgacagaattagtaagtgaccaagtgcctcgagcagtgcccgcccctagtagactctatggaagtgtctgctgcagttattgctgttattattaccacttttcctaagggcgttatttctggagtggactgatcgcttgattaatgagatcagacctggagcctcatgagagtgtctgcttttgctcactgttatggattcagcacagggcctggccctctgctgacccccagcatatgcttgtccagagaatgaatatgtacggacccatggtggcctggggcatcatgaggtcggctgcccacattctgagaattttgcatggtggagggcggcgtggtgggcgcatagggcccccatctatagaaaccacctctccacaccatccaccccacgcagcgtagtctaaaccgggtagggagaggaaggatggaagcagagtgttatttttgtaaccaagtagaagaagcgatgaatttttaatgtcccattcgaactccagctcctactcaccagtctctccgcatggagaagtggccgtcatggtcgacctgttcccaagggtggccttgtgagtgcaggctctcctcaccagagctgagggctttgtgaacctctgatgtcaatagatgcccctcatcttccaggaggacaaaacagggcaaagcaagacatggggtgagaacaggagtgcatcagtggggttccccaagcctgtgtcaggtccggatctgggtgggagttcccttctgcgtcatccaggccaggcgagtgggcatcctccctgagcacctgtgcttggggctttgcctgtgtcagtcaggaagacagagtacacggaagagttaccattgctttcagagcaaaccttcctttgacatgcatttaacacagcacggagtgattgacatgtgtccttgtgtttaatccctatcttaacctctcggttactgtcctgtttatcagtgaggaaactgaggcttattgcttgcctgaggcctcagtggcagaagcaagatgtgaatccgcacctgtgtgatgcccaagccagagctcttgtttactacccagagaagatgagcacaggtgggatgtacgtatggagggcgggtagggcagcagcccctctgaggacaggtggccagaacccaagcggcgaggtttgttcacagcctccacagggtggggtggggccatccgcagagggtctcctgccatcccattttccctgcataccagtgggtggtctgagagcctttgcagagaagagactggatctcagcacgtgcttatgtgcgtgtgtacatgcacacacatgcgtgtgattcatctggctcttactttatgccaaggagcctgtcacatgctttaaatgtattttccctagtttaattcttagagcacactgcaggaggtagattctgataaatccatcttacagggaaggaaacagacttaagtaggtaaagtcacttggttgaaaacatggaatgagtaagccaaggggcaggtattcaaacccaaacccaggtctgtgcccctgcagagcctgcaggagcagcccacacaggccaaggctgtgaggggtgctgtttgcacgcgtgcgtggccctccctgcagcccaggtgcctaggtctgggcctggcaacaccagagcacggggccttgccctcggggaacagccctcttttgtcctcaggctgtgggatgtgtcttggctactttgctgcccagcagtgcctgctctcaggcacatgtgagagtagaggcctagcatccgtggccacttccttcccagcccatttgctgctgccctttgctctgcagggctgctgggctcctgggctccacgcctgcttgctgcctgccatcaaggctggcagtgctctggggctgtaaaggtgcaggcgccgtacttcccaacccctggagctcgcacatggtaggagagaaagctcatgtgcatgcaacatccaataagactaaaagtgactgggggttgctacgggagaggtgctgagggtgggccggggacagagcaggcacactgtggagggggtgggcaggactcctgagaccagggcagggagggaggagatgctgggaggcacagggccatccagagagctgccacttcctgagcattgccatgcacgctgcaggcatggccatcttgagtcctcacactgcccgtggcctaggtggggtcttcatccccacgttgcagaggaggaaatggaagttaggaaggttaggtgacgtgcccacatgagtggtgtaagcatggttcccgccctgggctctctgaattcagtattgtatgggggaggctgggaaggtgagttagtactctccgcagtgagaacctgccttggctcccctcccctcaaggagttcatagccgtgggagggagggagacaagaactgttggagacaagaactgttagagaccagagagcaagggcgtgatgtggtctgcagggaggaggctgtctgaggcagaaccgggtcagggaggccatggtgcgggtaccctccaggcacggcatttggcctgacttttgaggggtgcccagggttggctacatggcggggcggaggtatctttagtgggggaacagcgttgtgccaccaggaggggtctctgtctcccaggtagaggaattctccatggtgagaggtggtggtgggggatggtctagctgtccactcttgccccctttcggatttggaaggaagccccatgctgggtccacactggtatggcgtattaattaggcagctgctttgtctgggagggggctttgtgtcgagtctccctgaatgagcagggctggcgacagttgtcaaaacacatggtgcttggtcagagcccccgtagaagccccttgtcctccgcatggcctccgcctgcacccggggcgtggaatgtgctcttgtgtgtccctggctgtctgcttgcttctacactggcccctgcagatggagggggtggggtacaggggttcctataagaagcagacacttggggtttttcccaggtcctgttgcaggagggtgcgtgggctggtttccctgaaggcgcctgggcgtgttggtgttaactgatctgagatcttctgtggccctgatgtctatgagcatgccccagcttgcagggggctgagtagccgggcaccaccaggaggctgcgtgccctgtgcttgggtgtacccatgccctgtcagcatcgttggtctgttagggtcagggacttcggcttcttgtttagtaccctccatcccttccagttgatcatcagaaacattctccttagatgcggctgcctgaccccggtgagggggcctgcctcccacttgccttccagcctcctctaagctgcactgagtcttaaaaataggaaggatagggctgggtgtggtggctcacgcctgtaatcccagcagtttgggagaccgaggcgggtagatcacttgaggccaggagttcaagaccagcctggccaacatggtaaaaccccatctctactaaaaagacaaaaattagatgggcatgttggcatacacccgtagtcccagctactcaggaggctgaggcatgagaatcgcttgaacccaggaggtagagattgcagtgagctgagattgcgccacagcactccagcctgggtgacagagcgagactccttctcaaaaaaaaaaaaaggaaaaaaaagaataggaaggatagggcatggcatgttctccaggagacagagggacgggggcatcttgcttgcaggaagccaggcgacacaggcgtgtgtgcagggctcagagggtctgtgttcctggcctttcctgggagggcttgctcttgggctgcccaaagctcaaagagagactcgaggaaatcctgcatttatgggagcttttcttttcctgccactttcctgttctgggttgtatctgtgcacgtgattggaacgtagcagcctgagctcctgcctgaggagagcagccacgggtcacggaagccagggtccagctggggcctttgggtctagctggcagatgaagggctggccttcatcaagaaaacaagccccatgagggcaggagcccgacctgttcattccacaccaccgagcctggtgctcagtcatgtttgtgtgactgagtgagccggcggcgggctgaggcgcttttgtctggtgtgcgtactggtctcccttgaggcagcttgggggtgtggaaaaagcacatgttgccaaaattgacagacctgggttcaaatccaagctctgccacttaccgcctggatggtcttgtgatgggtcattaaccaccccgagcctcagtttcctcacatctgcctcccggggtcactgtaaggatcagaaacaatgtgtgtatcggccatgtacggtgtgtgtcggcgagtgctccgtggcagctgcggttctcctgaggtcagagctgcggccctgcaggtgtgtggagagagccccgacagccaggctgactctgcgcactgtcctttgttctgcttccccagaccttcacggcatggtgcaactcccacctgcggaaggcaggcacacagatcgagaacattgatgaggacttccgagacgggctcaagctcatgctgctcctggaggtcatatcaggtgagactcccagccacgcagtgcggccgagccctggcacaggtgctctgccacagcggtccccagagaccctgcccacccagctgtcccattgctcctggggaggagagggcaccccttaatagctgcacggtggtctgatgggtggggccagagtggcctggtgggccagcagaggaacctgcttttggagaacagaggagactctaaagcctctctccctctcgccctctctccctttctctctctctgtctcgccccctcttttctctttgtgcacttctcaggggagcggttacctaagccggagcgggggaagatgagagtgcacaaaatcaacaatgtgaacaaagcgctggactttattgccagcaaaggcgtcaagctggtctccatcggggcagaaggtgagctggaggtggggcagcgagggtcctgctcggtttctgacctttaggctctgaagcacaacatctgcatcctgaagagaagttttgttggtggcagggcgcttggggcactcagagccccagtacatactcagcagtgatcacaacaactgctcttgatatgatgctgggcccacaagctcccccaaacccttggaaaaatccggtgggcgcagtccaaatctaggaagtgcaacccacccaaccacgggggcgacggcttctgcagggggaggaatggttttgactcggactcaggtcgccctcactggttctccttgtgccaggctcagcagacagtgacaaacatgtgccatggcctctctctgtaccaggaacacctttctcattatgccctgcccggtatcagagaaggactggaggccccatgtcaggcattgggacagggagtgcacggccaaaggtcagtgcctagactttgccctgtgtgcatgggcttggagaattttgcctctgaccaccccaggatcctcctgggccccacgtagataaccaggaccacagtccactacctgcaggccctcactagagcagcaggctctcagcaggggcccctgggttgagctcccaggcgcttttagagacaggcgaggcctgatggagccccagcagcatgagctcgcagtccactcattagtcagagtaagatttcttcaccctgacatccatgttgtcccagcttctagaaaaacaaagtaaactaattgccgttaatgacagggctctgagagtttggccaagactccgggccagaatgtgtgtgctgagttccaaggctctgccccggcccaggacctctgcgatgaggggtgccaagccttgcatgccacagtcgaggtggttggtgtttgtttaaaaaaatcacaacccaaaaattcagtcaggccctgagattttctgtccttgcatgggtctttcctccaggctctgttccagccttctgcttctcacagctgcatttattttgctcaaatgctagtctgtaaatacagaaggggttagaggagagacccatgtcagtcatcagttttcatttggagaaaaacttggtctaaaaatgttctctgttcatgcccaaattggttcactcccaatccctgtgactgtggggccttggaacaaagcctaatggaggcgttcctggggctcaaggcacctgagaaccccgccccaccctgtccccctgtccttccacatgattgggcattcgcgggagcattggcttcccgtgggggtgatgagaggggccggaggcacagctgcaggtcagagaagcagctggtggatgtgtcatgagaaacgccatcctcctctcctcaccggaactccataagccctccgttaccagctgcacctgtacttgctgagccggggagctgcggccttgcccagctctgcaggcccggccctcaggaggtgcacagaatagatttcctgaggctcgagctgcctcgctgcactaaggggcaggtggtgctgctcagtttctgggtctggggctctgaaccctaggacagggtggacactgggtccctcccctgtctctgggcagcagaatgagcatatttcctcctctcaaaacccgaaagctgtggctcatggacacccccttcctctgggtgtgtccccgggggaaggtgagccccatcttctctgtgacctctccacctgcttccaagcaagcctgccctggagtattctgctcagaggtcagtgagcagggtctcctgtggtgtcctgggcctccagctctgcagttagctttggaactcacccctgtgcccagcccttccccgagagtgcttgcagcagtggcgcccctctgtcttctttggaagccactccatcatgccccttgcatatggcgtgttgacaagttgggaggactgccctaggcacggctggctgatggactctgggatgaggcactgccttctctcacccagccgcagacacacagctgtcctgggccttgcagagatgatttttctcttaagttactgaggctgaagaaggtgtggtccaagcccttcttttgagaagtttcagcaatttttttttttttttttttgagatggaatctcactcttgtcacctaggctggagtgcaatggtgcaatctcagctcactgcaacctctgcctcccgggctcaagcaattctcctgcctcagcctccagagtagctgggattacaagcacccgccaccacgccaggctaattttgtgtttttagtagagacggggcttcaccatcttggccgggctggtctcgaactcctgacctcaggcgatccacacctgcctcagcctcccaaattgctgggactaaacaggcgtgagccaccacagccggccgcaaatgtttgtttttaggttagttcagaaagcgtgcagtctggcctcaggcccgtgctctccccttcctgacaacacagcagccatgcttgttcctcactggccttccaggcactggatccagtggtggtcagagcagccccgccctcacgagggcaggcagacagtgaacaagtaaacagcccgaccaacatgtgatttcactagtgatgccttggggcagcacaggggccagggagaggaactgggtggcgggttggggagctccttgggacgggcagtcagggaagccaccacgagaggtgacacaagcagaagcttacacgatgagaaggaccagccagttgagggtcgcaggctaggggcgtgctttgtgagtggacagagcgtatcaaagcaagaaagagcctggcttgcccagaggatgcagctagagaattccagcaggatggcagggcctgggccttcagggcaagccctttccctgtgggccaggcatggtggctcacacctgcaatcccagcactttgggaggccaaggcaggaagatcacttgagcaggagtttgagaccagcttgggtaacataataagacccagcctctacaaaaagtttaaaaactagcaagatgttgtggcatgcgtctgtggtcccagctactcgggagactgaggcagaaggattgcttgagcccaggcagtcaaggctgcagtgagctatgactacaccattgcactccagccagccagaccctgtctcaaaagaaggaaaccaaccatgctcgctgctgtgtcgatgtggattatgggcgggaagggtacataggaggcagccgcattgagctctggagatgacagtggcttggtggagagtgtcggcagtaggattggaaggaagtggacagattcacaataaacaataatgtagtgcacatttgctgactgcgagatgaaaaagaccacctttgccctgagagtgggggcccggggtgcccccctgtagtcaggaggtacgcagattacggcagaaatgtacagagcactgagagttgagagaggtgtgaacagaggccacacgcctgggaccagcctcttggaggagcggttttttgagttgggtcaggagaaggagctggctgcggggccagggacccttgtggccagaagcctgcaggcgctcagcagcaggaggctctgggacagtgctgcctagagactgttccctgcattttctcctgagggaggtggaggaggacaggcctgggagatgcaaccagggggtggtttggagcctttctctagatggggctggaaggccaccttcaggttgggcggaggagcctcactctggttttaacgaccttctgccctctgcccccttccctgtgtgcagagattgtggacggcaacgcaaagatgaccctgggaatgatctggaccatcatccttaggttcgccatccaggacatctccgtggaaggtgacagccacctgtactgcccccgcttcccacctgagtcagggcgggttagaggagagctgaagtgtgatcttcatgcttcaagcctcttcctgtttccttggggtcactcacagggcctggcccttgcaggggtagtcagtgggtggcaggtgaagggaggctcctcccagctgcctgcctcttggctccagtgccttccgagtgcctttgctctcacagcctcatctcagtggaccctcacgccaccctcatgagatgggctaggatggctgggcccgttttacagtccaggaacccaagtcccagaacagactagtgagagagttgggcctgggcctggttctctgtctgcttgacatccccatccttgaaacttggcccccatggacccgttatgagctcaggccgtccaggaatggacaatttcgcttccctgcaagcacctgtgtgcacacaggatgggcagagccacctgggctagcgtgcaggggctcccaggtgccaggtcgcagtgatgactgggagagatgtgcttcctgccctcgaagggctcccggtctgtgaggacagccgagctatccacggggaacagaagggccccctaggcctctctacagctggtatttcaccttgttcaaaagaggccaaggccggtatcaagggcctgtctgcagtgtgttctggtggtgaaaggcacaggcttggtggccaggcacatggcacagattcaggccctgacaccaccacctcctggggcagccctggtcaagcgactctcctcggggccgtgaggattaagcagggccgtgtgtcctggcagttgggcctggcagcatccgtctgcatccggaatgggagtggctgtcccgctgctatcactgctgctgttgttaggacagatatcctctccccttgggtttcgtttgaccccaggcctgagccgaaagtcccatccaacttgggctgagttctgagggtttatttttgagccagtgctcactgtctttgtgtgttttgcagagacctcggccaaggaagggctccttctctggtgccagagaaagacagccccgtataagaacgtcaatgtgcagaacttccacatcaggtaagcgccagtcctggtcatcctctcctttcctctaggaacctgagatccttcctcccacctgccctgtttgctgtgtttttgtcgtggtctgtgagatgccagccctcagtcagcccctccctggccacgggccctacaagcccatgggaaggtcacctggtcctctctgaggaagaggaggcagtttcccagccatcctggctgaaggcagtaaggtcagccctctcgccggcctaatagaacgttcttcgtccccaggcaaggtgactctcagaagcaacaataaagcttttcatttttgagacagggtcttgtgctgtcacccagactggagggcagtggtgtgatcactcatccctgctgccttggcctaggctcaagtgatcctcctgtctcagcctcccaagtagctgggactgcaggtgcatgcagccacacctggctaatttttaatttttatttttagtaggaacagggtctccctatgttgcccaggctggacttgaactcctgagctcaagcagtcctcctaccccggcctcccaaagtgctgggactacagatgtgagccactgcctgcctctggcctcttcctttattttgacagctcaggagtgaattgtttttagaattgctagtaaatttagtgttggggaaaaatgtactctgtggctgctaagatgaacaagcctcagctccaccatgaacctgcttccctcagggtgagcgggagatgagacatgtccaccatccccgtagctgaggcgagcatgggcactgccgcatgaggtccagggggcggcaagaggcaggcctgcctggtggttgggagcactggctctgggggcggtcctgaggtcagatccggtttgccttgtggctccaccctctgagtctcctggatggcccgcacaggaatgaagagcagggcctcatggggtttgcagcggcctcaggctctctgggacccttgctgggtacagagggcttttcccatcgtgctcaccctgatagcatgtggtccctcccttggtcactcttctctgtgtgtcttcttttttttcctgccactaactgactgaatctttctatagtttccattcattttcttcaactagtaagtatctagcatgcccgctgcatgccgttagtggagatacagtggcacccaaacaaagttcccatttgtgggaagtttacaccacagcgcggggaccagctgttagcacagcggccagtaatcctgcagcataacttcagtgagaagtgctgcacaaagacagggaagtcagatgaagaaagttccctgggtggcctttctgaggaggtgacatcgagcttgacctcagagggaaccaacccttagagggtctcagggaggagaatgtgacccatatagcttgtaactgaccaacttgtggccttggggaaggtctctttcctccagagaccagcatgccaagtgaaatcctggcatttagccagcccacggactggccttcctgtaagtcaggtccgccagggtgtggaggccacacagcacaaacaccagcatcctgcagtggccacctcccccgaagcggcctgtctggttcagggcggcctcccatggaaggtgctagcagttataaagcagttgtcaggagtcaggcactgatccaagcatttactcatttaatccgcacaacagccctatgtagcaggtatgtcactatccccatcatacagatgtggaaaccgagatagcctggcttacccgaggtcacactgtcagtaggcagaagagtcaggatttgatcacagactgcctggccccagaggtcatgcttgcagcctctctgccacactgtctccatgcagtgcctggcacaggccagactgcagtgaatgggaattagtcactgctgtgggtgcacagggccatacggcactctcatgacagtgagcgggccctcctataacctttgcctttccttccccagctggaaggatggtcttgccttcaatgccctgatccaccggcacagaccagagctgattgagtatgacaagctgaggaaggtgagtgtctccagctccccttgatggcccacagacgtgccctgtctgaccccctaactccgggtcaccatccccatgcccttccatcgccagcctccagatctgggttctgcacgcagatgggcagcctgggagagccttgtgcaggctctccgcaacccctggctcggtggctgactctcacctcccttattcccctcgtggactgtccagtctccctccatggcactgcaaccaacccggggttatttaagggcctggccagccatgctttataactccccttcctcaatcttctggattctagaacctcctctgcccaaaggggcagagggcaaggaattccaaaccatcaccacaagcccatgttgcccatgcagggtcctgctgtcatttgcctgtacaaagcctgtatggatccaggccctggccaccagaagctgccagcctcgtgggggaaggcaggacaaaaattgtgtccaaagcaaagcaccacaccaggccgtgtacatgtgctcaggctgaatggggtggcagggcatggggtcagatcagtgctgcggaggaggctagtgtaccccgagcgagcaggagccaggaaaggtcccggaagaagaggcagcttagagccagaggagggcttcctgggggaggcaccagatggcacccagcccgttccagccacagtgagcaagagagctgggccccggccagggagagttggagtgcagtgggctttagtcctgtaagcagtggggagcctgtgagggggctgggggacactttagggtggttgggacctgggacctctcggtttgctccccttacccagtccccagtgctctctcaggcctggcccacatcttccagtcaatgtgaaaaccaggttttagggcaaggggcttaagctagggtctgtgggtggctggaaattgtatgaaaagagtacacctgcatttttctggagaaaaagccctggtttgccccacaaagatttcacgaggcactcctgtgagtgggaattgaatttatccaggcggtgccctcccgctcacacatcacacgtggctgagaactgcctgaagaaacccccaaccctcgccctcccgggtctctccctctgggccagccctgcctccctcctgctcctgcaccctgccctgacggagttcttgttgtccccacttgcctccttctaggacgaccctgtcaccaacctgaacaatgccttcgaagtggctgagaaatacctcgacatccccaagatgctggatgcagagggtaagtcatctcttctgttcagccaccactgtgcttcctgatggccttttctgtccagggctggcctcgggcaaggggctgtgggcacatcagagctttgggtcaccttggggagctggcagagccagcaagaagggctgaatgattctgggtgaactggggacagccatgtcgccctgggagacagagcaagggtagcctgggctggccagatgccttcagggatgaagaagcgtatggggagggggagctgaaggatcaactctcctgagggtgcatctcctcagggcccaggaagggcaaggtggctgaggaggggtgcttcaggcttcctgcgagcaaccctggcctctccctccctacctgcagcaggcatggagtatggagcccgacaaagtggagtgttttgttttttccttttccggctttgctccatttcccagccatgcactgccccatttcctagccatgcactgccccagctgggacctgtgtctctggcctctggtggcccttggagttgactgtcctgctgctccttgaggccattctcagagagaggaagtggcctcattttaatccgcttcccacagccttgtcctttccagacccatgggagagggaggggctgagggtgtggctgagcccacccaagtcacgcgtcactctgcaggtccctctcccccaaggccgtggccttgggagcccgtggatcccagtgagtgacgcctccaccccccgccctactcgggcagtttaacccttgttgttcacttgcagacatcgtgaacacggcccggcccgacgagaaggccataatgacctatgtgtccagcttctaccatgccttttcaggagcgcagaaggtaccgagcagggccaggcaggccctcctcgccgccaccgcgcaatgccgccgctgcctctcgcctcccgtgctcacctcatttctcttgcagacggcagtggcctctctccaactggaagccacccccagctccctggcgttgctgccccctcagccttagctcacacacctattgggtacctcatctgtgccaggcttttccaggcattgaggatgccctggtgactgagtcagacaaggtccctgttctcagggcacttccatgctagtgggagaaacatacagcaggcctgtcacaggagtggaatagagaaaatggggccagatgggggacagagatggctggggtgaccttcagctggtgctgtcaatgtggaggggtgaagtgagcaggtacttgcagcaggagctgctagatgcaggctggggcacaggtgttccaggcagagggtgaagcactacgaaggccctgagacaggaagaagcttggcgtattcagggaccagctagagaggagtgagtgacacgcagtgatgggtcaggcccaacaagacccttgtggtgtgggataagaaattcatgttccactctgagggccatgggagccccttagggtcttactccgtggtgggagctgctcactcacattttcagacagatcatttagcaactgactcctccaacccaaaacaaagctgcctttatagggcccacagctagtctgtctccagcccaggccggttagaaaaggaatgcaccctattcggactccacaaaaccccgcaaggcatgtccacgcaggcctggggctggcttccagtccagagcaagtgctcttcctcctgcatgagcctcaggccggcccggccgccctccctgcgtctttcactctctcctgcctctctctctctttctctctctctctgtgcagatattgtgggcactctgaggccagatgagaaggccatcatgacttacgtgtcctgcttctaccacgctttctcgggggctcagaaggtgagctgggccaggcacacctcgctgctggggctgcagacctgccttcaccaccgcccttgcatcaccgctggccatctgtggttggagccctggccaggccgtgggccgccacaccacacagactgaccctgccggcctctgactcggaaggtcccctggggcaggtttcccgcctggccggtgctgggcctgtgctgaggagtcacagacctctgtttgaacacagcccaccctgggaggtgggtggtggcatcctaggctctcaggcggggaaactgaagccctgcattacagtcaatggcagagctgggatttgactgcccggcgttcccactcgccctgtccatcatctgcaccagggctgcctgcctgcccctgccaagcccttcgtggggagcactgggctttacccgttttgcagctccttcctgccaggaaaggctcagcatgtgcagcccaacctgcactcacggtcccagccctccagaggccaggcagagcccacagagcttgcgtggcagtggccgccctcctgggcccagctgacctcatgctgcctcacagctcctgccgggccctcagcgttcacgcagaggcccaagcactgctccccccgcttgccttgtggtctctgaagtatctcaggcagcattcccgatgcctgctttgaagtgtcagcagttggcacaggttcagaggaggaggcagaatcgattcttgtttactgaacatgtactacacgctaggcaccctccaaggccttcacatgcacaggcttccagagggtccctgtgcacacccccaggagggctaggcgcagttagccccatttgagagaggaggaattgaagtttagggaaacagctattcctaaaactagaaggggggggccgtaccttctgtggacccctgctttgagcctcccaactagcaggtgcattacctaccgtcagtctggcctggccccactctgccacctcttggtactgtgaccttgggtgggtcacttgacctcagcttccccacctgtgaaatgggcatcgctgtagttcggtctcacaggattgttctgggcgtgaaacgagctcctgcaggcaaagggcttagcacagtgcctggcacggcagctgccatttaggcagctgccagggagccacagtggtggggagtgtggttcttcccagcctcgggccagaaaggcctcttcacctcctcagcatgcgattggagcttgtgtttggagtgttctgctagagggcacgggccaggagggtggagggaggacccctgacccacactcccgcgggagggtgggcagggaccagcagcaatggacgattcgtcaccacagaccccaactaacagcatgtttgccattggactcacccctacgggccccgaaccagccccctgcccaccacatggcctcaccagattgcttttctttctacccacactgctcccctgtgcttagggctgaactccagtctggaggctctgagggattttgggggagcagggactggcaggcaagcccaggacagtatgggtgggtgctgaggcactgggcctggaggcttgtcactggcccctctctgagggggtagtggaggcccggctgcagggcgctggctggtcagaaaggaaagtgctgggtccctgtgtgctcctcaggacagccccgtggtgctgctcctgctgcctcgtttccccagagacccagtccaagctcttgcaagagtgctctctggggttcatgttttataaacgcagagtgaaccccaggtctagcgccagtgtgcccattctgtcctgagatcatttatttctagtcaccgaagcgttcccgcctcgttcctttattcactcactcattcagcaaccctgaacaccgccagtgcactgagccccaagctggatgcgggaactcagcggtgaaacatgattcccttgccttgcggcagccccgtgctcacagagaggacttgagtttcgggtgccagttgtctctgccaagttaggagtcagggactgacctctgtgacccccacaagctgcagccctggctgtgttttccacactggcctggggcccatgttcattggctgaggaacctcttggacctcatctctgaggagcaccgcctggggccctgggtgtgtgtcccgcagcatggcgcggggtgtgcacgtgcgtgtgtgcgctcacacgagcaccggctgccgcctccccgcctgtctccaggtgccatgtgtggaggggagaggctgggcgtcgctgcctgcagcactggctctgagccgttggccaagcctctccattttccttccccatcactctgtagaccctcctcactctttctgttcctgttctgttgccgtttcaactcctcctcttggaccctttctgtgcttcctgaaaggtacctggtctctctctccccgtgtgcaccccctgcctcctctacactgttcactgccccctagcaggacagggcaggacgctctcctgtagttcaggcccagggactatgtccaccactctcaccctccaaagccccagcacttttctgccccacggatggtgacttctgtcctctggagctcctattaacattgcctccaaggcaggagagtggacaggcctgagtgtgctcctgtgcacggaccactaggctcctccgggacccgggcgcccctgctctgttgcccccagctctccagctctcggcttcccatcctttcaccttcccaccgggagagactcctccgcagtcttaggtccaacgcagccgacccgtccagcctcaccctcctctgtgtggggcactagagggtttgcgagcagcagtgggagggctccccaaccctcctcggtgcctccagggtctgggctttctggacccaggggcattttgcagtcagcagtgaggatgccaacaaggcctattgggacagggcaccatctcactggagctgtgcttcctctccttcccctctgtgaggagttccgtgggccatggaccagctgctttcaagggacgtgcccgtcaggagggagggtggccagcccccaggcagccctgactgtgtgctcccctccaggctgaaactgccgccaaccggatctgtaaggtgctggctgtcaaccaagagaacgagcacctgatggaggactacgagaagctggccagcgacgtgagtgttcccccagtgaaagtcagggccacctcattatcctcagccagaggtcactgtgactcttgcagggggaaagcaggtgtggcagcgagatgacctagaaaaggctgcgtggtcacagaccatggcatttagccagctggtgtgtacacgacctctccgtttgcttccacaaggctaagggtcagaccggcagccaccttgccagccagcccctgggctcccgagcttgggttcctacagagatgctcagggacagtgtttcctgggcacctcagtgctttagaatcacctggggagctttgtgaaagcccctcttcccgtgccctggccctggagagagtgattcagaaggatggagaggggcctgggaaccaataggatagcaggccctgtgcaggtgcttaacgagcagcccagcaagacgggaactcggattatcctcctttccaagtgaggaaactgaggcccagggagggtcaggcacgtgcctgctgttacatgactagtgggacagagagctgggcttcacccaggcagccctgctctagagtccaaacccaatgcttcagttggaaataagggtggttagtacaactcttctggaggctcttcatttttgaaatctccatatttaaaaaataaacgtaggctgggcgcagtggctcacacctgtaatcgcagcattttgggaggccaaggcaggtggatcacttgaggtctggagttcaaaaccagcctggccaacatggtgaaaccttgtctctactgaaaatacaaaaattagccgggtgttgtggcacacacctgtagtcccagctacttgggaggctgaggcaggaggatcgcttgagcctgggaggcagaggttgcagtgagccaagattgcgccactgtactctagcctagcgacagagcaagactccattaaaataaaaataaaataaaataaaatttcccaaagagcagtggtttgactgctcatctagaaccagtggttcccagattttgcaatctcatagaccaggaaaatttgaaaaactattggatgtccaacctaagagggccagctttttattttgccaagttacggatgttttaaaaagaaacactaccatctgttaccaccagcacttctaacaccaagataaggtaaaaaggttattcttagaaccccagccattgccaagaaagggcagctggcagcacgcctcacaatgtatccacacagaggtatttctgtctttgaatttctcactttgccagaagttggcatttgggaaccacttctccagcttgtccgtgctggcagataactgattttgtacttctagaattgttttattatttttttgagatggagtttcactcttgtcacccaggctggagtgcaatggcacgaccttggctcactgcaacctctgcctcccaggttcaagcagttctcctgcctcagcctcccaagtagctgggattacaggcgcgcaccaccacgcccagctaatttttgtattttttttagtagagatggggtttcaccatgttggtcaggctgatcttgaactcctgacctcaggtgatccactcacctcagcctcccaaagtgctgggattacaggtgtgaaccagcgtgcctggcctagaattgttttagaatgtccaactgtttgttaccctttctcactccattaaagatctgagtagttcctaaaagaatatgtttgtttctttttcaattttattttctaatttatgtcccaggcccagtgcacatactggcctagccagactgagccaggtgggcttgtcggccttgcccttgaggcacttagtgagcccagaagcagtcaggctctcagcatggagctcagtgaagacagcggcagtggggcatgtgacagcatggaaagggacctttttggcgggggcatgggagtggaggtttcccctcttagacctgagggaaaagactaagagcaaaggcatgggccaggcatggtggctcacccctgtcatcccaccactttgggaggctaaagtgggattgcttgaagttcaggagctcaagaccagcctgggcagtatactgagacccccttctctataaaaacttaaaataaaaatcagccaggctcggaggtaggcacctgtagtcccaactacttgggagactgaggtggaaggatggcttcagcccgggaggttgctatgatcatgccacttcactccagcctgggtgacaaagcgtgaacctgtctttaaaaagaaaagcacaggcaggaacaggaagtaacaagagaacagtacagtgatgcagggacagggagggagcccacgctcccagagttccaggttgggggttctagcaggaatcgtggagaagttgggctggggagcaggggtaaccccctaaggtggggccctcaaagatccagatcccatgtgcccataagctggggggcagcccgtcagcactctgagggtcccccacaaaggccacgctggcttctgtggcccacagctcctggagtggatccggcgcaccatcccctggctggaggaccgtgtgccccaaaagactatccaggagatgcagcagaagctggaggacttccgcgactaccggcgtgtgcacaagccgcccaaggtgcaggagaagtgccagctggagatcaacttcaacacgctgcagaccaagctgcgcctcagcaaccggcccgccttcatgccctccgagggcaagatggtctcggtgagcaccaggattcacatgggagcagctgtgaggggcagaggcagccctagaactgcctgtgggcagtttggccagcgtaatctttcctaagttgttgatgtcctgtgggacatggcatggcctttcggatgcagtggtcggggaggggtgcacttcactcggcattgtgctcccctttggccctcactcactgtattttacacccagggttttatacgcatcccaaatccttgccacgggttgtgtgggtgtggagtggtgtgaatttggagccgtggtctgccatgatggcatgaccgccatgtgcttgaggcccttcatcagcggaggggcagtgcgccctggacggtaccacctccccatctatggtattcatccattcattcatgcactcacccgttcacgcattcattttgttaatccagaattgattgtacctgctgagtgctggggggccctgtgtaggcatccaggtataatagcaaagcatgacacagacatgaccccagccaagttctgccaccttcccatcagcatcccttggagacatccccctgggtgcctccacttccttgtgatagccctgcctgctcctgccctgccccaggacatcaacaatggctggcagcacttggagcaggctgagaagggctacgaggagtggctgctgaatgagatccgcaggctggagcggctcgaccacctggcagagaagttccggcagaaggcctccatccacgaggcctggactgacggtacggcccagctctgccccactctgcccagccccgctcccgtgctcccctcctgtctctcaggcatgcatgggtgtgcacacacagccccctgccacgttgggtctgtttctcaggtgccctttcttgctgcttgggagcatgtgtgtgtgtcagaaatgctgctttagagccaggttcagtggctcacacctgtaatcccagcactttggcaggccaaggcaggaggatcacttgagcccaagagtttgagaccagcctgggcaacatagcgagaccctgcctatacaaaaaaattttagaataataaaattagccaggcatagtggtgcacacctgtggtcccagctactttggaggctgaggtgggaggattgattgagccagggaggtcaaggctgcagtgagccgtgattgtaccactgcactccagcctgggtgacagagcaagaccctgtctcaaaaaaaaaggaaagaaatgctgctttggattccttcagccccagaaagcagggaccattcaggggccaggtcctctttgttgcccagtctgccctcgcctcagaggtgggaccctgtcagtcatccaggaacacagccaagccccctccagcacttcagggaagtgaccttacacccatctgtttgtcccctctgcgtgtcttccccatccagggcgagtgtgtggggcaggcctcttccatcccccgcaccctgtgttcagagtcggcttccctctcccacacctctgtgagcgtggacggaaggctggggagcccatgttcactggcacgtccctcaggctagaggagggcctgcctcctgggcctgctgccggaccacagccagtgctcaccctcagacagtgctcacccactgccttcggcccacccttcagcatggcccacctgtgagctcctcccacctcccatcccttcccagagcctccttcccgggcctggctccccctgcaggagcgccactgtgctttctgttctcggcagccctgcagctgcctggccgttggctccagatgtgggatttcatcacgtccctggccctcttttgggtcatgccaaggttgagatttcagatcccaggggtctggaagccttcagaaagctgccagtgcctgggagagccacaagagccactcacaggactcctctcccactctggccaccaccttcccaacacagtctccctggccctccggccgccactccgcccagctgagcccttccttgcattcctgagtgcattttctcacccctccccaccctggcccgcatgcgagtgtgcagctccacacggcctgcagccctggccacggcccagcttgtgccctcctcacatgagctcagctcgccattcccgcggcagctgccagcctcagagcagcccagcccctttgctaccaggaaagagtgcgagtgagagagtggatagtgagggaggaagggcctggccaggccgggtgccgcacttccctcttgcctggcagaaaggcacccatgtgaggagagcgtgttagcaccgatgccatcttgtgtggttggtggcctccatccattcccggattcactcattcgttcaacagacagctcaggtggctccagccgtccttatccatggaggcctgggcgtcgccctgtggctgaaccttctgggggtctttctgcccacccatcagctcttcagtccctctacagggctccatgaggccctgcagatggtttcctgaggccaaggggctgggtgtggtggccccactggcattcctcccctgggaagggctctggggcagccttcacctgaggtgtttagaagccagctcagtctccggccagggcccagctggttcagcggcctccacacgtccctgccccacccctacctgactgggcatccacgcgggtctgcccatggcgtctgccagagcccccaggcaggctggcctactaattcccaagactcagagcctctgtcctctcaagtagcagttacgtgaaacaggacaggcaggccctccacaccccagggtctggtcgtagcggcctcctccgccctggggtgggtgggccaccttcactccacacccctcaccatcccccacagcccgcagcgggagggtcgtcgtggatgcttctctgagggacttgatttcctgggaatacgaccaaccccgaacgaccccttgtccccactccagttgtcccttggcctggatcccagatagctgtggcaatggtccgctgcccacatcctctcggtgcacccttgccaggactctgcggaggcagagggagatgtcacctgctgtttctggttcctgcccctgggagaaagcagttggagaagggaattgcaaggccgccttgtggctgagcctcctgccccagggctgcgcagcagggccggtggagccagagtctcccaggcctcccacttcttggccatcagtgccagagccgatcctgtggggagtctggtaggtgcctgacagttgagactgggagaggctgaggtgaggctggtactggctccatgcctgctgtgctcgaacaccacctcactgaaacttgagaatagttccatgccacacaggtactggggctggccccattttacagatgaaggcacaggcccagagaggcctcggtggctgcactgggcgggcagctgtcaggtgctgggacagagctgaggggatctccgctaccacttgggggaagcccaaggtggtgtgcctgaggcagggcccctgtaggagctggggtgcagccaccttcccaggctggcattttccctgcggttccctaaagaccttcacttgcttgcagggcttccttgagctttggttctgggatgtgtaattagccaggatcagggactaataacagcgttcctcctttcctttaaagggcctgatggtgggcccgccccaatgcacacaggacaccttaggacagcgtggggcacttagacgtggagaggaccaccacctgtgcgggtgcagggtcagggtcctagaagaagctggctctgatgcttccccttccccaagcctgctgggacatgggctttgaccccgggtgcttctccggatcaaagccctccagaaacaggtgctacctttctaagccgtgctaccacggcccgatttgtatggtttcctactaacaaaagttgctaagtttaggacacacaggttgagatggaatctctctctcaggctgagcaaccctgaagtgtccatccaggtccatccaggttacagttgggcttagagatccctggagggtacggaagaagattctggaagtttccatgccactgtcattggcatggaaggatgtggggtccacagtctctctttccctccctctgcttggacagcccctccagactcctgccccacagctgccgtgctgtggtctaagcgtctctctgctcctaccagggaaggaagccatgctgaagcaccgggactacgagacggccacactatcggacatcaaagccctcattcgcaagcacgaggccttcgagagcgacctggctgcgcaccaggaccgcgtggagcagatcgccgccattgcccaggagctcaagtacgtgcgggctcaggacactatcatcacctggctctcaccacagcctgcccagactggtggcggcagcacgccgaggcccagcctgcctcaaggcctggaatagggtccccagtgccccaactgcacctccttccagaagccagggaagggccttatgggatgaggccttttgcccatcctgtctcagccccaggtgggacacctgaaggatttggattctctagcaggagggaggtgtctggccccttgtcttgattcttcaggctttaggggtccctgggggtgtcacctctcctggccaccccaagtaggccctggtcccctgatgggatgggccccagcctccgttgctcccagccataggtccctgagggaaccaggctgcacagtgagcctattgttctgctcggccccttccctttcttgctcagaatacacttattgtaagagcttccaggcagccgggctccttcccctccccacccagtcagataaacttgtgtacacaattagtacgctgagggtcgcgctggtgaatggggccttattccaccagtgcagcggccagcagcagggcgggcccaggcagcaggaggcccaggccattacttcatggaaaatccacaggccctcgaggggcagcagggctcccaaaatagccatctgctcaaaaataggatccttggctataactgctctttccaccgacacccccaccccaccacagtcacccccaaaggtctgcttattcctatgagtccaaggcccgtttattcctgagtccaaggcccagccctgatgccccagtggagccccatgctgggcagagctggtttcctccccgactcactacccactactgtccgggtgctttgagggttccccattggctcagccagaggcaagagtcccgtggggccatcacagcatttggcacagttggggcactccaggggtcctgccaccaccacgtccaggccaaggagagcaaggtcacagatgcagcaccctcgggggtgtgggggtgggacacaggcagcttccccagtgacggaagagcccctggaagctggtaggaaacagacttgaaataaaccctaggcttgcccccttctcaggccctgggcaaagctatgtgaaacccattactctgctcaggaacaggcggtccccgaagcagctctctggacggtagccctgaaggaacggaagggagggctgtccgggtcctgtcttttctgctgagggggaattacagaggcctgtggaccgtccaggatgagccggatgggcagccctgctgagcactgattaatggcgatagcaaaaactcactgagctctcagggctttatgtgtaccagctcatttaatccccacagcaactgtgtaactgagggaaccgaggcacagagaggccaagaggtttgcccagggtcacacagcaagggagtggttgagatgggaatggagcccaggcccccagccctactgtggagcacagcctcagcccctgtccgctgtctgtggctggctcgcctgctccccatgtcctgttcctccccagagtcgttccctgccccctacccctcctcaggccccaaggcctggttgaagggccacactcttagctgatagtggcagaatgagtcagggatgggtgagcaggaggaagccgcttcccttctcacccctggttatcacctgttaaccagctctgttatcaccccttcccttctaccctgggggtcccatgggccagaaccaagctgtgatttgattgaccaattagtgattggttgctgatatcctggaatgttgactgccccaacaccctggcctgggaaccttgggggtagatgggtccaatccatctagccacttgcccttgccgagtctcattgctctctgcccggcccgcagcgagctggattactacgactcccacaatgtcaacacccggtgccagaagatctgtgaccagtgggacgccctcggctctctgacacatagtcgcagggaagccctggaggtgaggagggggtgacatcacccacggagctctgtgcccctgctgccccggggctggtggtgtggatagtgtccagacctgtgagctccccccacctcccacggagaggatgttctctgactcctcagggccctctggacccctccccacccctcctgctcacatactgacctgccttccctctgtccctgcccccttccctcccacacactagaaaacagagaagcagctggaggccatcgaccagctgcacctggaatacgccaagcgcgcggcccccttcaacaactggatggagagcgccatggaggacctccaggacatgttcatcgtccataccatcgaggagattgaggttcgcaccccccggccccccatcttcccaagagcctctgtggggctgggccgccccctcactccagctcctcccctagggcctgatctcagcccatgaccagttcaagtccaccctgccggacgccgatagggagcgcgaggccatcctggccatccacaaggaggcccagaggatcgctgagagcaaccacatcaagctgtcgggcagcaacccctacaccaccgtcaccccgcaaatcatcaactccaagtgggagaaggtgggccggggccatccgtaggggctggggcaggacggcggggctgggggccacctccctgaccgctcccacaccgcgtctcctctgccaggtgcagcagctggtgccaaaacgggaccatgccctcctggaggagcagagcaagcagcagtccaacgagcacctgcgccgccagttcgccagccaggccaatgttgtggggccctggatccagaccaagatggaggtgaggcacggctgagccccacagagctgagaaggttccaagagagctcccgtagtgagggggtccccggccagcccagggcctgcagactgaggcgcctggcagagcaggtcccaattctcaccacccaggggccgtgatcaccctgcggggttaggagagtccacagagcttgcgcctggaatcccggcacctggggaggctgaggcgggcggatcgcttgagcccaggagttcgagaccagcctgggcaacatagtgagaccccaactctacaaaaaatacaaaaattagctgggcatgatggtgcgcagcccaaggaggtcgaggctgccgtgagctacgatcatgccactgcacttcagcctgacagcgagaccctgtggtctctagtgggctacctatgggaggtgggtttgatccctgaatgccctggtctgatgattgtgagactcaggcactattgaacctctgatcctgtcctcccagctctaaaatggggatgaaaacagttaccttattacttcaacaaatgctttttgcaccaactaaccagccacatgagtgctgtcattcttacagcagttctgaccaccactcactgagcactcactacataccaggcaaccaggctggcagcaggcaacctcgtttaaacccagcaagcctgagagggggtccgggtgccaggcaggtcagccctgaggttcatgccagccacgcagcatgtggacttgtgggtgccgagacatggagtgcccgaggtcaggagctgcagccaggccagggttcagatcccaactctgcctctaacagcactgagctgtcctccgtgagcctcggtttctacctctgcagtcagggcctgccacagccctggcctcacagagaggtcaagggtaaaatgaagttgggcacagggagcgcttggcagagaaaacctccctgtcattgtcatagctgctttaacatgagagggcaggaccggaggggacagttgtgagcagtgggccttccctcccagggacccatgggccaaggccccaggccaaaggggccccggggaagatgcaggccagcagcgcgagtgggctcctccaggtggtcagtgggggcaggcccaccagcctcaccccaccgcctgcacccacccccgtaggagatcgggcgcatctccattgagatgaacgggaccctggaggaccagctgagccacctgaagcagtatgaacgcagcatcgtggactacaagcccaacctggacctgctggagcagcagcaccagctcatccaggaggccctcatcttcgacaacaagcacaccaactataccatggaggtgcgcggctgccccgcccgctggcctttccaccagcatggccggcttcctcactggaaatggttcgggccagtgagaagatagctgtctgctgtctgttgtttttcactctgtttaaaaattattgaagagaccagcactttgggaggccaagtgggaggatggcttgagcccaggagttcaagaccagcctgggcaacatagcaagaccctgtctctacaaaaaatgaaaatattagccaggcatggtggtgcatgcctatagtcccagctccccaggaggttgaggtgggcagattgcttgagccagggaggcagaggttgaggtgagccgaggtcatgccaccacacttcggtctgggtgacagagccagactctgtctcaaaaaaaaaaaaaaaaaagattgaaaagactagatcaaaatgtttagacatttttaaaaattacactttccctagcactgctctcatcaccatgacaatgcccctcacaggacaagctgttctaggggcccacagagggcaccgtttgccctgtggccttagcagtatcagccttgctcagggccagagccagccagcgggtgccgggtcagggcagcagctcccactggctaacactccggggacattacaagctggtcgccgtcatattggtagcttgagaaaccaaaagactggacactcttgatccaacccatacaggtccacagatgcttcaaaccagagttggcttttttgtttttttcccctgagagccagtggtgagacactgaccagagtttgtccaaacagtctccacagggatcccggcacaagattcatgggtccttgcccttctgctgcccctgtagctgggaaacacacttactgtggagacagacattggcagaggcagcagggaggcaccatggcccgtgtcccctgtgaggtgtacaggagagcaggggctttccccagggcgggaggacagttcacagtcctccacgtgtgaaccacggtgaggacagttcacagcacccggcccacgatcacgcccccgtctttccgcagcacatccgcgtgggctgggagcagctgctcaccaccattgcccgcaccatcaacgaggtggagaaccagatcctcacccgcgacgccaagggcatcagccaggagcagatgcaggagttccgggcgtccttcaaccacttcgacaaggtgagcagcctgccacctcctcggcctctcccctcccgccgttgccgtaccagcccacaccttcgtctctgcatctgttcgtccattcccatcacagttgctgagcgtcggccgccactcccagggccagcagggccctgccactgtcagggtgtaggtgtgcggcaccaagaccccagcctgggccacttcacacgcacaggcagggggccggaggtcccaagtcctgccttctggggtggcatcctcaccacccccagggcagatgaagtctcagcacacccaggctttgcgacccggtctgtgaacctggacacagacaccccgcacagtgcttttagaattcagatttggtccggcagcctcatcagaggggccctgagcgccagagtttgctgccatccccagcccacccctgccgggctgacggactgagaagtgtgcagcctcagctctgcacctggcgcccccaggacaggatacagtcccctctgtcccactccaaatcccaaaggcaaggagaaccccccccccgaccctccaccagtcctgggacttgtcctcagttctgtagcatccagctgccacccctgctgtgggcagagaggtcggggaggcctctgccttcctttgagcttccgaggttggggaaaggatgaaaggggcccgtgccgcccccgaccccacgtgtccctggccatctccttgtccatgttgcctctaactctgtgtttccctcccctacgtgtcccttccccctgccctctgcatgtgaccccgatccctcatcctggtctccacgccgcccctcccgcacacctgccttcggatggccccggcaggatcatggcggggcgctggggcccgaggagttcaaggcctgcctcatcagcctgggctacgacgtggagaacgaccggcaggtactgcaccctgggccccagcggaccatggcattaactgctctctctctctctctccttctctctttctcccctcgccatcccacccctgccatcctgtgtgccatctcatggctctcttgcctccctgcccacatctccctggaccccttcccttttacctggtctcttggggccgctgtctccctgctccccgccactgtcctgtctgcctgctgtgcacatggggcggcccctcttgcctactctgggcccggcctcctctgctatgcctgcgtcctcggagcagaagcagacaggcagcatggactccgatgacttcagggctctgcttatctccacaggatacagcctggtatgcagctctgtctccccagccacccgctcctcctcctcctcctcctcctcctcctcctcctcctcccccccacctctccccctcaccgcctccagagcttcctcgtcctcggggacactcctccgcccgagcagcgcagccgtgcctgcctcttcctctgctgcatctgccggggtggggtccctccgatgacttcccgagccccccttcttccctagaagtctccagaaagagggggcagctctcccactctctcccctttttctttctctttctctctttcttccccatcctccagagcttactcgtgagcctgggctgagggcagtagaccccagttccctgctgtgggagaccacgagaggggagggtgcagagaggccctgcttcccggcctggggcactgggggcttggaggcctgggtcagctggagcagtggcaggctctgcccggggccaaggctgctggagcaggcggggaacagggcgcacgcacacgtgggttgggccctactctctcggctgtttccctggagaccccaccagtgtgggcctggctgcccctgccccactaaatgtcgggtgtcccccaccccaccctctccttgcagggtgaggccgagttcaaccgcatcatgagcctggtcgaccccaaccatagcggccttgtgaccttccaagccttcatcgacttcatgtcgcgggagaccaccgacacggacacggctgaccaggtcatcgcttccttcaaggtcttagcaggggacaaggtgagcgagacccctacgaggtgcatgggggctggcgagaggggtccctgcagtgggaggggctgagggggccagtgtgtgggtggggatggctcagagtcccatcctgcctgccccagaacttcatcacagctgaggagctgcggagagagctgccccccgaccaggccgagtactgcatcgcccgcatggcgccataccagggccctgacgccgtgcccggtgccctcgactacaagtccttctccacggccttgtatggcgagagcgacctgtgaggccccagagacctgacccaacacccccgacggcctccaggaggggcctgggcagccccacagtcccattcctccactctgtatctatgcaaagcactctctgcagtcctccggggtgggtgggtgggcagggaggggctggggcaggctctctcctctctctctttgtgggttggccaggaggttcccccgaccaggttggggagacttggggccagcgcttctggtctggtaaatatgtatgatgtgttgtgcttttttaaccaaggaggggccagtggattcccacagcacaaccggtcccttccatgccctgggatgcctcaccacacccaggtctcttcctttgctctgaggtcccttcaaggcctccccaatccaggccaaagccccatgtgccttgtccaggaactgcctgggccatgcgaggggccagcagagggcgccaccaccacctgacggctggggacccacccagcccctctcccctctctgctccagactcacttgccattgccaggagatggccccaacaagcaccccgcttttgcagcagaggagctgagttggcagaccgggcccccctgaaccgcaccccatcccaccagccccggccttgctttgtctggcctcacgtgtctcagattttctaagaaccaaaaaaaaaaaaggaaaaaaaacacaaaacaacaaaaaccaaaaaaaaaaaaaatcacaaaaacaaaaaaactataaaaaagaaagaattaaaaactttcagagaattactatttactttattaacttacggatttattatataaatatatattcacctagcaacatatctctgccgtctctcctgctctcataatgaagacatagccgattctctgcccgggccccttgctgatgctcctccgggtctgcgtcgggcgtgggtctctggggaccctccagaggtggaggtgggctgatggcctggctgcctggtggttgatggttttgctccccctaccttttttttttgagtttattctgattgattttttttcttggtttctggataaaccaccctctggggacaggataataaaacatgtaatatttttaagaaggattcctgcagcatcatctttttttatttctcctgtgtctgtcctccaccttctaggagagccagggcagagctagcactgtcttaagctgtcaacgtggactagctcgtgtcatctgctcgagaagggctgtcgctgttcttgtttctgagtgaggagtacgcaggccagagtggtcacccggccgtgagcagtgagggccagagactagccccagacaggtggatgccagagagagtggcacccatgccaggcaaggcctagggaggtggtcttgctcagcaaccctgccctgagcagcaggtgcgcccatccggagatcctaggagaaggtggccacctccatccactaaggaagagaaggaagacagtggcttgaggcagggagctcgcaggacagagcctgagccaccctgtccctcccacctggctcacctgtctgtgggtcaggcagatgaccccctcacccccatccaggtgctggctgcagtggcctgtgcagagaggggcagggtgagtgcccaccagtccccgtaccccttccccccatgccccaccatgccggggtggtactcacagaagatgcaggtgaggtgggccacacaggacacgaaccgctcgaagtccacacgcagacggctatcccggtagcggctggtgagggtctgggtcagctggttgttcaggtggaagcctagggggaggctgcttctgagcccagtggcccacagggaacccaccttggcattgcatccccaccccacctcctcagggaggacatgaatgccacagggtgtcacaccccaactctgccccatcccggcagggtgagtacaggctgatcccttcaatcctctgggcctgtttcctcatccatcaaacggactaagacagccccgaccccatagggtgtgtgaagacagaacgctcaggacagcgtctgacacgtgactcgatgtgtgggtactgttactccttaaatcctgtggggctttctccttgccagtgggcactggaggatatttctgtgcagcaaaaaatatagtcaatcccatatggagtcagtttccttacagtctacctcagaggcgatttctaaagctgagaaaccatgtctgctgtggagtctcattggaggcttttaaaaacccaaaacaatgggttcttgaccccttctgagatgcaaggttgtgcctgatgacctttgtctcccacacggccagacaaacccagttccaagtaccgtttcatgggcttctgctgcttccaaagcccatcttcacccccattctgtgtgttcattctcttcacaaatatctaccaagtaagtgccatttcatgctgtgcccagtgccaggtgctgttttaacaggagggcaggtggcctgcagcctcttcctgcccgtgtgacctgccccaggtcactccctctggcattcatctgccctcgggcataggggtggaggctgccatgcccagggctatggggaaacccagccagatggggtggaaggacccgagaaggcgctggagcccctcagctgccactgcaggagttcccgtttgagaaattctcaagggcactttatcagtttccttcttcctggaataactcctggcatgtaacaggcactcactggtgccagatgcgtgaacacaagcctgccacctgccacctgctgtgagtccttgctccctcacctccactcctgtctatctccggcccagcctctccctctctgccccacgtctcccaatccttggctgtctctgaccccatttctccccctttgacttgggctttttcttttttcttttttgagacggagtctcgctctgttgcccaggctggagtacaatggcatgatcttggctcactgcaacctccacctcccgggttcaagagattctcctgtctcagcctcccaagtagctgggattacaggcacgcaccaccacgcctggctaatttttgtagttttagtagagacgggggttccgccatgttgcccaggctggtcttgaactcctaggctcaagcaatctggcaatctgcctgccttagcctcccaaagtgctggcattacaggcgtgagccaccacgcccggctggctcttttggacacttgaccaccttctctgggtctcacactcacagccacacccaaaccctctccctctggctctccgactccatcacagtcaccccagcccccatctccctgtggctccatctgctgtgtggtggcagacaggccccagagtggggttggggatctgggaactccaagttctgaccccagcccactctccaaatcccctccacatgagggtcacagtgctgtactgtctcatctgccttggagcccatggaaagcctttctctctggctctctttcttggttaggatgttgtgctgggcttgttccagctcatcaggaggaactcagcctagtagcagaggccattggccggctctctttggggcttttggtaatgaaagctgcattctccaatcactaagtgctatgccctgcagtgcatggacgactcctcaccaccctgtgtactagctttttttttttttttttgagaggcaggctcttgctctgtcacccaggcacaatcacggctcactgcagcctcagcctcccgggctcaagccatcctcaagcctcagcctcctgagtagctgggaccataggtgtgagccaccacaccaggccctggccattttagagaggaaaatggaggctcaaagagatgaagtcaagtgcccagggcccctcctggagtcagtagagtgaggattccaaccccggtgcaccagaatccagaacattctaccatgctgccctgggggccagaccctctcagataccagctcctaatcttccccttcctggaggggcctctccctgccccagaacccctaccaggcacatccccctttcatgtcctccccaccccacacacgccccttgcccttctccttccttatttggcctctttcagggtcacccaacccctgccagggactggcaacaagctaaggtgtgggcctgtggatggccacagtgcagacggccacagctgagcagggggacttggagacaatgggatgggagagaacaggtcctgtccccacgaccaccccaggaccctgtccacacctgctgcattcagtgccagcctcagctcgtaggagttcatggttccagaggtgtcctcatcgaacttgttaaatatggcctgggcaggaaggatgagtcagggctgccctccatgccctgaagagggctgccaatggggcctcccaggcaagacagcctggtgcccatcccaactccctttcttctggtgtggacccccagcaagcagcctagccacttgggacttctgtttcccaatctgtaaaatgggaataagagcaatgacccagaggacaagctgaggctgggtgggggcagggatatcccagccagatctctccaagtcagcctagtccagtaccccctcgttccctggggacctgatagcccacagggtgcctatgtctctgttagtaaaggtttctctctttctgggaagaggcccagtctcccacctcacctgccactccaggaggtagccccagagctgctggaagtggtgtaaggccaggctttgcccatgctgtgttgggggtcgggggcatctggttaaggtcaatctctccagaaggggaggagagaccccaacgtccccttccccactccctccctcacccaggcactgccccccatgtaccccgaaacactgcagcagctgctcacaggtcctgagcccgatctctctgggggtggaggtatgggccctggctacaggaaaaacaaagtcaaaccacagcacttcctgcattctggccaccactttaagggctgggtggatgtgactcccttaagcaggtgatgttgtcagtcccatattatagaagccgaggcacagggagccagtgactgctgcgcctagcagagctgggattcaaatccaggcagggggtgcccagtctgtgctcaaggcagccttgcctttcagcggaaggggagcttgcgagcagccgtggcccaggtcacggggcccacacaagatcccctgcagggagatgctgccaggctgagccctggcttcctgagcccaactcccagcagcgcggtgggttcatagacatagggtggcaccggctctggttgcaggacccctggctaagacccctcctcctgcccctatcccagccaactcaccaggctccagggcaatgcttagtaaggcctggagctgagaggcattgagttcttcctcctagtccaggaaagagggcttgtgaggccatttactcatccagctgctctgggccaagccctgtgctagggacacggcaggggctgacagagcctcagagccctagctccaggagtgggggagacagacctgtccccacagggccagggctgtgacgggggaagcactgggctgtggttgctggtggggggccagcagaccggcctggggcaggggggtggtcagggagagcttccagggctgggcaccttagatgagacctgagcctggctggaggtgtcaggagggagagggtggtcctgggagagggtatggactgagcccaaggccctgaggcagggaggagctgtgagcatttcaagaaaaggtcaggagatttaagcccggagggaggaaaaagcaagcaaaatgagacacctgagatgctggggtgggggaaggggggtccccaaggggaggccgcagcgggataccccctcagtccaatccccctcctcacctctccagccagctcctgaaacagctgctccaaccccagctccaggggcaggtaggggccctgccgcatggcggaagtttagcgctggccaagatccccgccccatgccgcccctccaggaacagtccccacctggagagactgcaggtctgcgctgatcacgtcgtcgatctccctgcaaattacagatgggaagtggggagggggctgtttgccccagctggggctgtgtgggacggggtctcaggtgaggaatcgcgtggggtctaggtagggaccgtggagccctgggctcatcctcgcggggcgggggttctgggggcggggcgggggttctgggggcggggcgggggttctgggggcggggcgggggttctgggggcggggcgggggttctgggggcggggcggggcgggggttctgggggcggggcggggcgggggttctgggggcggggcgggggttctgggggcggggcggggcggggcggtggttctgcgggcggggcggggcggggcggggcggggcgggggttctgggggcggggcggggcggggcgggggttctgggggcggggcggggcgggggttctgggggcggggcggggcggggcaggggttctgggggcggggcaggtcaggtctcgggggtctcgggggtctcgggggtctcgggggtctcgggggtctcggggcctgtctaggcagggatggggtcggatttgggtgcccggggctcacacggccgtgtggcggcgctcggagaagacacgcagagtgaagtcagcctcgtcgccggcgtgggcggtgctcggcaccaccaggtagtggcctggacgcaggcagcagcggcgggtcacgtcgcggcgggcgctgaggggcgagcggtcggcgcgcagcagccggggcaggagcgcatggctgcgcggggaatcccagaggcccagcagctggggacggggcggcatgaccacggaccaggctcacccccggcccttcatccccgcaccctccagcgcgccccgtccaccctgcctaacccctgtccacgcctcccctgcccccggacccggctctgcccccccacccccagggcagtttgaccaagccccagggcaggttgaccaagccccagggcaggttgaccaagccccagggccggttgaccccatcccagactcacctcctctggaatctgaaagaagcaagagcaaggggcgtcggggcaggggagaggtggccgccgctcagggtctcctccctgccccttctcacctctgtgctctctccctccttcttcgtcctattagacccttattgaacctttgccccgcagtccccgacccaggccctcgccgacccctccccaactcttccttccccatctgcgctcccagcgccttctctgtatccttggtcccctctggcccttctaacccccagcctctctctgtccctaacctcgtccctctgtctgtccctgagcccctccctctcattcccttagctccctctcccctctgagacctggccccccagccctactagccccctactcccctcccagcgccgccccctcttggccctgctcctccactcctcccctcctccccgatcctcttcagtcccacccctccaccactccccctcttcccccttggccccgccctccacacctcccctcttcccactggccccgcccctccatgcctcccccgctccttggcccggccccgcccctccaccctccgggttccctccagcctcagctttgcccaggacctcacctggaacacgtggaagccaacggtgaggtaagtgaggcccttggctctcaggcgccgccggttgcgctggatgagggacagaaggaccgtgcacttgggcgtgcggcccccccgcgctgggccccgtgcccctgcagccccccagcccccccagggcccttcctcatcctcgtcatcctcctcatcaggctccagcagcgttaaacggaactgaggattggtccagaaggtttctaagggaggaggaaaaaagggggtttcctagccggccacagcgccccccaccccaggaagcctctcagggcccctcaggcctcaccagcattaggctggctcccgccggagttgaagccacgcacccagcggccttggaaggtgtggacgtgccagccgcccccctccgggctggggcccagcacctccgggctcagcgagcagatctgcacggtgtcgaaatggaggaggaagtcccgcagctccatcctgcacggtggcccagtcagaccctgcccggccccacctcgagggggtcccaagatcccggaaatgactcccagatcccaaagcccctcacatttcttaaatattgtcaaatacccttcaggctccagaaatgaaccccaaatgcctgggcctctagctctgccaaattcctccaagtcctcagacatgccccacaaatcgccaagattcacaagctgcccccaaatatcgttaaattgccaccaacccccaaatagcaagaccctcagactctaaattaccaacaagtacccttcagcccctcaacattgccaaatctcaagaaatgccccaaatatcaccaagccttcctccattgccctaaatactgcccatccctttcaatcctccacagataactaggccttcaaattcccctcatattactacttttttaaacccactccaatcagaggttctctaatattactaccaattcttccttgatttcccaaaatagaacctggccccaaaattaccaccgatgtacacagtttctccctattaggacccatccttcaactggggctcgccctccctgaaccccttggcagagaccctcccagaggcagagctgggaccctgacgaactgaccagaactcgccatcctcctttttcaccagcagggcatcgcggcactcggtggggagtgtgtcccagcgtgggcagctggagagactgtggtgtgaggggcgggcaggtggggtccagccccacacccaccccagacccatcccacctgtcgctccaggcccccgtccactccacgcagccccatgggttccgcagccgcagcagccgcaccttggtgaagcccaggaacacctggggcagcatcgtcagtgggggtgatgcctggacatggcctgccaccccacccatgggggacacttaccttgtgtgtgcccgtgatggaatacgcgtgtccctttaccaggccctcttctgtgcggtactcaccccgatcactctgggcaggggatgggatggtgaggccaaggtaggggacaggagggcagctgctcctccctgcccccaacctcctgccaccaaggcaggagccaaccagagcactgaactgaatggcacgcagctcagagaccatgtcagggttagtgactgaaggcgaaagagaaaaggagaggaagggagatggaaacgagacaaaaggagatggaggtacgggctcacgcctgtaatcccagcacttagggaggtcgaggtggaaggactacttgaggccaggagtccaagaccagcctgggcaacatagcaagaccccaagtctacaaaaattttaaaaattcaacaggcgtggtggtgcacaccagtggtcccagctactctggaggctgaggcaggaggatcccttgagcccagaggtcaaggctatagtgagctatgatgacactactgcactctggcctgggtgacagagtgagatgagaccctgcctccaaaaacaaaaacaaacaaaatagatggaaagaggcctgttgtggtggctcacacctgtaatcccagcactttgggaggccgaggcgggcagatcacaaggtcaggagattgagaccatcctggctaacacagtgaaaccccatctctactaaaaatacaaaaaactagctgggcatggtggcgggcgcctgtagtcccagctactcgggaggcaaagcaggagaattgcttgaacttgggtgacagaggttacagtgagccaaggtcgtgccactgcactccagcctgggtgacagagcaagattccgtctcaaaaaaaaaaaaaaaaaaaaaaaagatggaaagagtagagagacagagacagagacaaagaaagatacagaagagagaaacagacacaaaagaaaaagagaagcagtaactcagaggatttaagtaaatgaatgagtgaaggagttagaccaactcagtgaatgaatgagtgtgtcatggggtcacagatgaacacatgacccaagctaagcccacgagaatcaatcctgggacttttactgaaattctcagaaagaggcactttttttttttttttttaaataaaccctagggtggtaggagatacctgcagctatgggggatccttttatgcccatgaggggagagcctggctgagagtgacactaacacagaatgagaaataaacatagttgcaacaccctcagcatctggatccagctgtgcctgaagcccctgattcatgagagcaaatgaatttatttttgactagttagatttatgagcgagcctaagccagtaacggaagcagagaacagaggaagcactccgcccaccccaccacacccctgactgtgctctggtcctggtgggggttccgcatgcgagtccaggtctcttaccagggcagtggcgcccacgagggactccttggccagggcatggcgcagggcagagaacagccccatgctgttttgtctcagatagagcacctcgcccacgccgcctgtgaaatccacaaaagcctcattcatgtggccgccccgcatcacctcataggagccgtggagcctgtgggggcagatctggggtgagggttgaggcaagtacaagcgtctcaggcacccctgccctgggatctgcaggggcctgtgtctcagggtgtggaatccccaggggaaattcctgaagttttgagactttttccagggtcaccctgtggcccaggccggagtgcagtggcgtgatctcatctcactgtagcctcaaactcccgggttcaagcgatcctcctcccacctcagcctcccgaggagctgggcccacaggtgcacaccaccacacccagctaaaacaatttcagactcttggccaggcatggtggctcacgcctgtaatcccagcgctttgggaagccgaggcaagtggatcacctgaggtcaggagtttgagaccagcctggccaatacggtgaaaccccgtctctactaaaaatacaaaaattagctgggcgtggtggcacatgcctgtaatcccagctactcgggaggctgaggcaggagaatcgcttgaactcgggaggcgaaggttgcagtgagccaagatcacgccattgcactgtagcctgggcaacaagagtgaaactccatctcaaaaaaaaaaaaaaaattcagactcttgacggggggaactgtggcacatacagaagcccttggagattgggcctgtggtccttggggtgaccaggacttcggtttggtggggggcatgggagagctgtgttagaattctgagagtcctggtgctgtctgaaaccttgaacctctggtagatgtccgctttgggggatcatccctatgggggcttgtcaggaatttcagagcctcagaatggggaaaaggcaaagatttgagggtcccagggtgacccccaatattttgggggtgctttagatttctcaatggaccaggagagacaatctaagatatacagctcacccgaggggataaatcccagatttggtgaatccagggcctgatatatgagatttcaggatccttaagaattatgagtgactgggggtctccaggaatgttttgtgtgaaatattgatggagagaggggtttaagatttgaaggtacagctgagcacagtggctcacacctgtaatcccagtactttgggaggccaaggaaggtggatcacctgagatcaggagttggagaccagcctgaccaacatggtgaaaccccatctctactaaaaatataaaaattagccaggcatggtggtgcgctcctgtaatcccagctagtcgggaggctgagacaggagaatcgctggaacctgggaggcagaggttgcagtgagccaagatcgcgctactgcactccagcctgggcgacagagtgagtgagactccgtctcaaaaaaaaagaaaaaaaaaaaaaacatgaagttgctcaggtgatgttgtgatatgagggttctggcggttgtcacttggtttgggattcttggtggggtgtttggaggattgcagagcttgggggactctgggtccccctgtggcttgatgcctgctgtggggacttagggctgcagctggttggaactggggtcctcacttggcgtaggccttctccaggagtggggcccagaactcattccgctgttccgagcgcacgaacatcagcttcccctcacgcacgggcagcctgtcatccaccacgacgtccatccagcggccaaactgccagagctggtgggagaagatgcagggccggactcggcttccaacctccaaccctgcctgggccctgcctctgctgtgccagtcccagagtcaggaattacagccccaagtcaacgttaactatgaaatccatatggctggccgggtgcggtggctcacatctgtaatcccagcactttgggaggccgaggcggatggatcacgaggtcaggaattcgagaccagcctggctaagatggtgaaataccatctctactaaaaataagaaaaaattagctgggcatgatggcgggtgcctgtaatcccagctactcaggaggctgaggcagagaattgcttgaacctgggggcggggcgaaggttgcagtgagccgagattgtgccactgcactccagcctggatgacagagtgagattccatctcaaaaaaaaaaaaaaagaaaaatccatatcaccaagtcaccatgggggaaacggaggcatgggcagaggaactgagctgtacctggaagtggaagacgcctgcgtagccatgctggaaatcctgtccaggagggaccacccggcgcaggagccggggatacagagtaagggaggcggcagctgcaaggaaccagcagttacctgggaggagaggccaggattaggtgaggatggaaggagggaggcctggtgcggtggctcatgcctctaatcccagcactttgggaggccaaggcagaaagatcacgtgagcctaggagttcaagaccagcctggccaacatggcaagactccactacaagaaaatttaaaaattagctgggcatggtggcatgcacctgtagtcccagctacttgggaggctgaggcaggaagattgcttgagtccaggaggttaaggctgcagtgagctatgatggtgccactgtattccagaatgggtgacagagtgagaccccatctcaaaaaaaaaaaaaaaaaaaaaaggaaggaaggaaggagggaggagggagagagaggcctagggagagaagagactgaggagggatccaggggccgggagtgggtggacaaagggatggagctgtcaggatctcagctgaaactagctggatctgaggactccaggtgggttcagggtctcacccaggctcccctgacacacgtctgtgcggctcatgtcttcacagatgaacttcggctcagcacagaactcctgtgggtggtgggggattccaggcctcagcctgagaaagcgaggaaaggtctcatccagaggagtgagggcctccaagcccatgaaaggcctggaagcctgtgggcaggagcatggcttccctgggtctccagaagttgtgctgagccagtcccatggtagccccctcctccctcagacccgggagtccaggcccagcccctcctccctcagacccaggagtccatgtcccgagcccctcctccctcagacccaggagtccaggcccagcccctcctccctcagacccaggagtccaggtcccgagcccctcctccctcagacccaggagtccaggcccagcccctcctccctcagacccaggagtccaggtcccgagcccctcctccctcagacccaagaatccaggtccccagcccctcctccctcagacccaggagtccaggtccagcccctcctccctcagaccccggagtccaggtccccagccccctcttccctcagacccaggtgtccaggccttggcctctcctccctcagatccagaagtccaggtccaagccccctcctccctcagacccaggagtccaggtccccagcccctcctccctcagacccaagagtccaggcccagcccttcctccctcagacccaggagtccaggcccagcccctcctccctcagacctaagagtccaggtctcgagcccctcctccctcagaccagggagtccaggcccccagccttccttcctcagacccaggagtccatgcctccagcccctcctccctcagaccccagagcccagaccccagccacactttacatggggcctcatccatttcacgcctttggccttctccgagtccggccccagctggtcatagccaagggcatcagggccagcagggaagtaagggtcgcggaacaggatccccgaatccaggcaggctgcccgaattgcctcatagctctggccccgaaaaagctgcaggcgcccggctccgaccccagcctcctcatccacgagctggatggtgaccctcccactgctggatgccatctggacactggcctcacaagccggcaccaggccctttaacctcctgagtcacgggggcggggcctctcttccattggagccccagtggggtctttaggcaatgaggagccttccctcgttaatattaattgatggtttggggtgctggggagcagggacgcctcttcagtagctttcttcccagggcgtggggccttcagttgtggccaaggtagcagcttaatgggcttggccagcagcaggagagaaggcgggcagagctgagggaggaccggctgccgctgtcagagcaccaagaaggaggtcagtgtgggggtgagcttctgcctacttatgcctgtggggctggggaaggaggcgggtttacctcggtgtctctatctctcagactgcctctctccccctccctctgacagtttctctctccccgccttcatgtttcttctccatcagtttctggagtgcagtggcacgatctcagctcactgcaacctccgccttctaggttcaagtgattctcctgcctcagcctcccaagtagctgggattacaggctcgtgtcaccatgcccagctaatttttgtattttttgttagagaagggattttaccatgttgaccaggctggtcttgaactcctggcctcaagcaatccgcccaccttggcctcccaaagtgctgggattacagacgtgagccactgtgcctggtcaggttttgttaattaaaaaaaattttttttaaagtagagacagaggggtggcggggggcggtcccatatgttccccaggctggtcttgaactgctggcctcaagtgatcctcctgcttcagcagcctcccagagagctgggattacagatgtgagctactgtgcctggccctttcttgttttttgtttctggcaatatttgtgtctctgtatttccccaactccacccctctccccaccccaccctctttttttttttttttttttttttgtagagatggggcggggatctcactttgttgcccagactggtctcgaactcctgggctcaagtgatcctccccgcttggcctcccaaagtgttgggattacaggcgtgaatcactatgcctgtcccctctctctttgtgtctctttcagcgtgtgtctgttcctctctgtacctgtcagacccaggagtccaggcccccagcccctcctccttcagaccctgtcagtgtaccttgtgtctgcctccctgtctcttcctctccatctttctgtctgtccctgtaacccatatgtggctcctccatcatccaccgagggaccctgagctcccctccgctcacgccccctaagccctcaggatgcgcctcctcccctcccggacaaggtagactcagcctgcttgcccagggaggctgaccctggagggatggctctgtacctctcctgtgctgggagccatctggtgaccatgatgccctgccctggcccacgccactcagagtctggatggagcagtatttcccccaaaggactctggagccattggaggaaatgggagaaacaggtacggagatgccagagcctcagcagtgctggtcccagcagaccttccaccctcgttgagggtgtctgctgccctcccagagccttgtcacctccacgccactcagatgtccctcaagccttttggccttcttccctccaagtggacccacaaatattgtccaagccacccacgtacacggctaccaaaagtgggttacaaaacaggctttctggctgggcgtggtggctcatgcctgtaatcccagcactttgggaggccgaggcaggcagatcacctgaggtcaggagttcgagaccagccaggccaatgtagtgaaactccgtctctactaaaatacaaaaattagccggacatagttgcgggcacctgtaatcccagctactcagaaggctgaggcaggagaaccgcttgaatctgggaggcggaggttgcagtgagccgagattgtgccactgcactccagcctgggcaacagggcaagactgcatctcaaaaaaccccccaaaacagggccgggcatggtggctcatgcccgtaatcccagcactttgggaggctgaggtgggcagaacacttgaggccaggagttcaagaccagcctggccaacatggtgaaacaccatctctattaaaaatacaaaaattaggctggacgcggtagtttactacgcctgtaatcccagcactttgggaggccgagacgggcgggtcaggagttccagaccagcctggccaacatggtgaaaccccatctctactaaaaaatacaaaaaaattagctgggtgtggtggcacgcacctgtaatcccagctactcaggaggctgaggtaggagaatcgcttgaacccgagaggtggaggtttcagtgagccaagactgcaccactgcactccagcctcggcaagagagcaaaactccatctcaaaaaaaaaaaaaaaaaggccgggcacggtggctcaagcctgtaatcccagcagcactttgggaggccaaagcaggcagatcacgaggtcaggagatcaagaccatcctggctaacacggtgaaaccccatctctactacaaaaaatacaaaaaattagccaggcatggtggcggccacctgtagtcccagctactcgggaggctgaggcaggagaatgacgtggacccaggaggcgaagcttgcagtgagccgccactgcactccagcctggttgacagagcaagactctgtctcaaaaaaaaaaaaaaaaaaaaaaattagctgggcatggtggtacacacctgtaatcccagctactcaggagggtgaggcaggagaatcgcttgaacctgggaggcggaggttgcagtgagccaagatcacgccactgcactccagcctgggtgagagagtgagactccatctcaaaaaaaaaaaaaaaaaagttttcttcgtgtaggattgccaagcccaccccagccccacgggagtcatatgggagtgcttccagcctgccgggattaggagccacagcacctggggtccaatcccagctctgccacctacacctgtgtgtctttgggcacatcacttaacttctctgtgcttcagtttcctcatctctgcaatgcggatgatgatagggcgtacctcggagggttgctgtgggaagcgaatgagttcgtacgtgggatgagttcagagaagtgcctgacacagagtcgctgctcactgcacgaggcattgaccatgccttggcgttcaagagtgtctgctgccctcccagagccttgtcacctccatgccactcagatgtccctcaagccttctggcctccttccctccaagtggacccacagatattgtccaagctgcctacgtacatggctaccaaaagtgggttacaaaacgagctttctggctgggcgtggtgggtcacgcctgtaatcccagcactttgggaggccgaggtgggcggcctcggccatccacagtcaacctgtctccttggatctgggctgctgtttctttcacttgtttgttggtttattttttgggacagtctcgcctcgtcacccaggctggagtgcagtggcgtgatcttggctcactacaacctccgcctcccaggttcaagtgattctcctgcctcagcctcccgagtagctagaattacaggcatgtgccaccacggctggctaatttttgtatttttagtagagacagggtttcaccatattggtcaggctggtcttgaaagcctcacttcaggtgatccacccgccttggcctccaaaagtgctgggattacagacaggagccaccgcgccatgtcttactgtttctttttttgtattgttttgttttgtttctgagacagggtctgactctgttgcccaggctggagtgcagtggcacaatcttggctcactgcagccttgacctcccgggctcaagcaatcctcctgcctcagcttcctgagtagctgggaccacaggcttgtgccaccatacccagcaaatttttagactttttggtggaatggagtctcactttgttgccagggctggtcttgaatccctgagctcaagcaaacttcccatgtcagcttcccaaagtgctaggattataggcctgacccactgcacctggccagatgtacaactttcaaaccactgaagtagcttaaaatgaaaggaaaagaaaatgtaatctatttggcaatggtcgaaaagcaaaggaaaatgcagcgaatcatagaaaataaaagcaaaaagcatcacacaatgacctaaataaaaccaagcatatcagttataacaacattatgcaaatgtgtgaaacgtacttgggaacatcaacaaacaaaattcaactgtttagctttcaaaacactttccaaagataacaccaccaagttttaaaataaaaggattagaaatagctatcagtcaaaagcagatacacaaaaatcagggcaaatctgatattagagaaaaccggatttaaagcagatagcattactttggacaaaaggagttattttctattgataaagtgtatgatccagaatgaaaagtgattggatgggtgcagtggctcatgcctgcaatcccagcactttggaaggctgaggcaggtggatcacttgaggtcggcagtttgagaccagcctggccgacatggtgaaaccccgtctctattaaaaatacaaaaattagctgggcatagtggtgcatgcctgtaatctcagctactcgggaggctaaggctcaagaatcacttgaacccaggaggtggaggttgcagtgagcccagattgtgccagtgcactccagcctgggtgacaggacaagactctgtctaaaaaaaaaaaaaaaaaggctgggagcgatggctcacgcctgtaatctcagcagtttgggaggcccaggcagacggattactcaaggtcaggagttcaaaactagcctggccaacatggtgaaacctggctccactaaaaatacaaaaagccaggtgtggtgtgtgcctgtaatcccagctactcacgaggctgaggcaggagaatcacttgaacctgggaggcagaggttgcagtgagacactgcactccagcctgggtgacagtgtgagactccatctcaaaaaaaaaaaaaagtgatcatttattacactattagaaacaaaaggaaaaatacacagaaacacagtagtggtcatgggtaatttgaaaccaccattattcttcaaatatcaagtcttttaaaatgtgatattttgaataatagaatacagtgaatttaatatatatgcacactcattacatctatatacactcatgattttcaagcatatatcaaacatttgcaaagactcaatttaaaaaataaaaggccgagcacggtggctcacgtctgtaatcccagcactttgggaagccgaagcgggcagatcacctgaggtcaggagttcgagaccagcctggctaacatggtgaaaccccgtttctactaaaaatacaaaaattagccgggcatggtggcaggcacctgtagtcccagctacttgggaggctgatacaggagaatcacttgaacttaggaggcagaggttgcagtgagccgagatcgcaccactacactccagcctgggcaacagaacaagactctgtctcaaaaataaaaaggctgggtgaggtggctcacgcctgtaatcccagcactttggcaggctgaggtgggcggatcacaaggtcaggagatccagacaatcctggctaacacagtgaaaccccatctctactaaaaatacaaaaattagctgggcatggtggcgtgtgcctgtagtcccagctgctggggagactgaggcaggagaatggtgtgaacccaggaggcggagcttgcagtgagccaagattgcgccactgcactccagactgggcaacagagcgagactccatctcaaaaaaaagaaaaaagaaaagcgcctctgagaccagctgaataacatcaagcaaacaaacatatgtataataggactctggggaaaggagaggaaggagaaaaatttttgaagcattaatggctggaaacttttcaaacttggtgtaaacgttaatttacacaaactccaagaagtataaatacaaagagagccatatctagattcatcgtagtaaatgtcaggcctttgagcttaagctaagctatcattatcttttgtgacttgcacatacacatctagatggccggttcctgccttaactgatgacattccaccacaaaagaagaacccctcaaccccttctccttcaccgttagtggcaagtcccgcttttctgggggaggggcaagtaccccaaccccttctctccgtgtctctaccccttctctgcttttctgagtggcaagaacccctcaaccccttctccttcacccttagtagcaagtcccgcttttctggaggagggacaggaaccccgacctcttatctctgcaccccgatcccttatttccatgcccagacctcttatctctgtgccccatcccttatttctgcaccccaacctcttatctctgtgccccaaccccttctctgcttttctggagggcaagaacccccccaccccttctccatgtctctactctcttttctctgggcttgcctccttcactatgggcaagcttccaccttccattcctccttctcccttagcctgtgttcttaagatcttaaaacctcttcaactctcacctgatgtaaaatctaagcatctaattttcttctgaaacgccgcttgacccccatacaaacttgacagtagttccaaatagccagaaaacagcactttcaatttttccatcctacaagatctaaataattcttatcataaaataggcaaatggtgtgaggtgcctgacatccaggcattcttttacacatcaggctctccctagcctctgttcccaatgcaactcgtcccaaatcttccttctttccctcccacctgtcccctcagtcccaaccccaagtgtcactgagtctttctaatcttccttttctacagacctatctgacctctcccctccttgctaggctgagctaggtcccaattcttcctcagcctccgctcctccaccctataatccttttatcgcctcccctcctcacacccggtcccccttacagtttcgttccgtgactagcccttccccacctgcccagcaatttactcttaaaaaggtggctggagctaaaggcatagtcaaggttaatgctccttttcctttatcccaaatcagatagtgtttaggctctttttcatcaaatataaaaatccagcccagttcatggctcgttcggcagcaaccctgagacactttacagccctagaccctaaaatgtcaaaaggccgtcttattctcaatatacattttattacccaatctgctcccgacattaaataaaactccaaaaattaaattccggccctcaaaccccacaacaggacttaattaacctcgccttcaaggtgtacaataatagaggcagccaagtagcaacatatttctgagttgcaattccttgcctccactgtgagacaaacctcagccacatctccagcacaaaagaacctccaaacgcctaaaccgcagtggccaggcgttcctccagaaccgcctcccccaggagcttgctacaagtgccagaaatctggccaccaggccaaggaatgcccgcagcccaggattcctcctaagccgtgtcccatctgtgcaggaccccactggaaatcggactgtccaactcacctggcagccactcccagagcccctggaactctggcccaaggctctctgactgactccttcccagatcttctcggcttagcagctgaagactgatgctgcccgattgcctcggaagccccgtagaccatcacggacaccaagctttaagtaactctcacagtggaaggtaagtccgtccccttcttaatcaatacggaggctacccactccacattaccttcttttcaaaggcctgtttcccttgcctccataactgtagtgggtattgacagccaggcttctaaacctcttaaaactccccaactctggtgccaacttagacaatattcttttatgcactccttttagttatctccacctgcccagttccctaattaggccgagacacttcaaattatctgcttccctgactattcctggattacagctgcatctcattgccgcccttcttcccaatccaaagcctcctttgcatcctcctcttgtatccccccaccttaacccaaaggtataagatacctctactccctccttggcgaccaatcatgcaccccttaccatctcattaaaatctaatcacccttaccccgctcaatgccaatatcccatcccacagcatgctttgaaaggattaaagcctgttatcactcgcctgttacagcatggccttttaaagcctataaactctccttacaattcccccattttacctgtcctaaaaccagacaagacttacaggttaattcaggatctgcgccttatcaaccaaattgttttgcctatccaccctgtggtgccaaacccatatactctcctatcctcagtacctccctccacaatccattattctgttctggacctcaaacatgctttctttcctattcctttgcacctgtcatcccagcctctctttgctttcacttggactgaccctgacaccaatcaggctcagcaaattacctgggctgtactgcctcaaggcttcacagacagaccccattacttcagtcaagcccaaatttcatcctcatctgttacctatcttggcataattctcataaaaacacacgtgctctccctgctgcttgtgtccgattaatctcccaaacctcgatcccttacaaaacaacaactcctttccttcctaggcatggttagttcggtcagaattattacacaagagccaggcccgcaccctgtagcctttctgcccaaacaacttgaccttactgttttagcctagccctcatgtctccgtgcagcgcgtgccgctgctttaacacttttagaggccctcaaaatcacaaactatgctcaactcactctctacagctctcataatttccaaaatctattttcttcctcacacctgacgcatatactttctgctccctggctccttcagctgtactcactctttgttaagtcccacaatgaccattgttcctggcccggacttcaatccggcctcccacattattccagataccacacctgacccccatgacggcatctctctgatccacctgacattcatcccatttccccacatttccttcttccctgttcctcaccctgatcacgcttgatttattgatggcagttccaccaggcctaatcgccacacaccagcaaaggcaggctatgctatagtacaagccactagcctgcctcttagaacctctcacttcctttccattgtggaaatctatcttcaaagaaataaattctcagtgttccatctgctattctactactcctcatggattattcaagccccctcccttccctacacatcaactcgaggatttgcccccacccaggactggcaaattagctttactcaacatgccccgagtaagataactaaaacacctcttagtctaggtagacactttcactggataagtagagtcctttcctacagggtctgagaaggccaccacagtcatttcttcccttctgtcagacataattcttcagtttagccttatcattcccttctgtcagacgtaattcctcaatttagccttcccacctctatacagtctgataacagaccagcctttatttgtcaaatcagccaagcattttttcaggctcttagtattcagtgacagactaaaacacacctcaccaacctcagccaccaacttaaaaaggactggacaatatttttaccactttcgcttctcagaattcaggcctgtcctcagaatgctacaagatacagcccatttaagttcctgtatagacactcctttttattaggccccagtctcattccagacaccagaccaacttagactgtgcccccaaataacttgtcatccctactatcttctgtctagtcatactcctattcaccgttctcaactactcatgcatgccctgctcttgtttacactgccagtttacacagtttctccaagccatcacagctgatatctcctcgtgctatccccaaactgccactcttaactcttgaagtaaataaataatctttgctggcaaggctatgctgaacctccttaggcactctctaattagatgtcctaggtcctcccaattcttagtcctttaatacctgtttttctccttctcttattccgtttagtttttcaattcatacaaaaccgtatccaggccatcaccaatcattctacacgacaaatgtttcttctaacaaccccacaatatcaccctttaccacaaaatcttccttcagcttaatctctcccactctaagttcccacgccgcccctaataccgctggaagcagccctaagaaacatcacccattatctctccataccacccccaaaaattttcactgtcccaacactttactactatttcattttatttttcttaatataagaagacaggaatgtcaggcctctgagcccaagctaagccatcatatcccctgtgacctgcacgtacacatctagatggccggttcctgccttaactgatgacattccaccacaaaagaagtgaaaatggcctgttcttgccttaactgatgacattgtcttgtcaaattccttctcctggctcatcctggttcaaaagctcccctactgagcatcttgtgacccccactctgccctccagagaacccccctttgactataattttcctttatctacccaaatcctataaaaacagccccgcccttatctcccttcgctgactcttttcagactcagcccgcctgcacccaggtgaaataaacagttttattgcttacacaaagcctgtttggtggtctcttcacacggacgcgagtgaaagtaaaactgctgaaaacaattcaaaaagggcatttttttttttttttgaggcagagtctcactctgtcgcccaggctggagtgcagtggcacaatctcggctcactataagctccatctcccgggttcacaccattctcctgcctcagcctcccgagtagctgggactacaggcacccaccaccacgcctggctaattttctgtatttttagtagagacggggtttcaccgtgttagccaggatgttctcgatctcctgacctcgtgatccaccctccttggcctcccaaagtgctgggattacaggcgtgagccaccgtgccaggaaaatggaaaattttaaaggagcaagtgaaaaacagctcattatgtacaggggaacaatagaattaatggctagattctcctaggaacaatggaggccagaaggcagatgaatgatttattcaaaacactgaaagaaaaataaaactgtcaactgataattctatattcaacaaaactatacttcaaaacaaaaggcaaaagaaaatcattcccagataaacaaaaagagaattcctgactagcatatacctaaacgcagggaatactcaaggaaacccctcacactgaaaatgacagtagacagaaactcaaatccacaggaagaaatgaagagccccagaaatgtatttttcttttcttcttttaatttattttaaaacataaggtcaggctgggcacggtggcccacgcctataatcccagcactttgggaggccgaggcaggcagatcatgaggtcaagagatcgagaccatcctggctaatgtggtgaaaccccgtctctactaaaaatacaaaaaaaattagccgggtgtggtggcgggtgcctgtagtcccagctactcggaaggctgaggcaggagaatggcgtgaacctgggaggcggagcttgcagtgagctgagattgcaccactgcactccaggctgggcgacagagcaagactccatctcaaaaaaaaaaaaaaaaaaagaaaaaaaccatataaggccgggtatggtggctcaaacctgtaatcccagcactttgaggccaaggtgggtggattgcttgagctcaggaattcaagaccagcctgggcaacatggtgaaaccccatctctacccaaaatacaaaaattagccaggcatggtggtgcaaacctatagtccagtcccagctgttcaggaggctgaggtgggtgtattgctggagcctgggaggtcggagctgcagtgagctgtgattgtgccactgcactctggcctgtgtgacagagcaagactctgtctcaaaataaatagacagacaaataaataaaattgtaaaaaatatatatatataaaattgtttaaagtaaaggttatgccaggcacagtggctcatgcctgtaatcccagcactttgggaggccaaggacagtggatcatccgaggtcaggagttaaagaccagcctggccaacatggcaagaccctgtctctactaaaaatataaaaattagctgggaatggtggcaggcacctgtaatcccagccactcgggagactgaggcaggataatcgcttgaacctgggaggcagaggttgcggtgagccaagatcatgccattgcactccagcctgggctacaagagcgaaactccatctaaataaataaataaataaataaataaataaataaaggaaaggttataaggccgggcatggttgcttacgcctgtaatcccagcactttgggaggccgaggcggtggatcatgtgaggtcaggaatatgagaccagcatggtcaacatggtgaaaccctgtctctacaaaaatacaaacttaaccaggcatgatggtggctgcctgtagtccgaggtactcaggaggctgaggcaggagaatggcttgaacccaggtggtggaggttgcagtgagccaagatcacgccattgcactccagcctgggcgacagagcaagactccatctcaaataaataaaaataaataaataaaatacaaaaaattagctgggtgtgatggtgcacgcgtttagtcccagctactcaggaggctgagacagcagaatggcttgaacctgaaaggtggaggttgcagtgagctgagatcatgccattgcgctccagagcgagactctgtctcaaaaacaacaacaacaaaaaaacgcgaggcacagtggctcacgcctgtaatcccagcaccttgggaggctgaggtgggggggatcacctgaggtcagttcaagaccagcctggccaacatggaaaccccatctctactaaaaatacaaaaattagccgggcatggtggcgggtgcctgtaatcccagctacttgggaggctgaggcaggagaatcactttaacccaggaagcagaggttgcagtgagccaagatcgcgccactgcactccagcctgggtggcagactgagactccatctcaaaaaaaaaaaaaaaaaaaaacccagttatatagcactgtatttttttagagacatgatcttgctctgtcactcaggttggagtgcagtggcatgatcataacccattgtaacctcagactcccagtctcaagcaatccccctgcctcatcctccctagtagctgggaccacaggtatacaccaccacacctggataatttttgatttttttttttttttgtagagacagggtctcactatgttgcccaggctggtctcaaactcctggcctctagcaatcatcccacctcggcctcccaaaatgctgggattccaggcgtgagccaccacacctggcctgtatccctgactaggtgacatacacagtcgggtgctgcatcaccacgtttcagtcagtgatggactgcacatgcgacaatgtcccataaaattacaacgaagccggactcctatcacctagtgatgctgcagccatcacaatgctgtagcacaattactttatttttttaaatttagggtagcctaagagtacagtgcttataaagtctacaggagtgtacagtgctgtcctagccttcacattcactcaccactcactcactcacacctggagcaacttccggtcctgcaagctccattcctggtaagtgtcccatacaggcgtaccatttgtcatcttttatttatttttctgagatggagtctcactctctcacccaggctggagtgcagtggcatgatctccgctcactgcaacctccatctcccaggttcaagtgatcctcctgcctcaacctcccaaatagctgggattacaggcgtgcaccaccacacctggctaacttctttgtattttttttttttttcagccagagtctctatctgttgtccaggttggagtgcagtggcatgatcttggctcactgcaacccccgcctcccgggttcaagcgattctcctgcctcagcctcccaagcagctgggattacaggcacgtgccaccatgcctggctaatttttgtgtttttagtagagatggggtttcaccatgctggtcctgctggtctcaaactcctgacctcgtgatccgcccacctcagctcccaaagtgctgggattacatgcgtgagccaccgtgcctggcctaaacttctttgtatttttagcagagacgaggtttcaccatgttggccaggctggtttcgaactcctgacctcaagtgatctgcccacctcagcttcccaaagtgctaggattacaggcatgaactactgctcctggcccattttccatcttttataccatagttttactgtaccttttttatgttcagatatgtttatatacacaaatacttaccattgtgttacaattgcccactgtgttcagtacagttaaatgctgtgcatgcttgtagcctatgagctgtaggttactttatatagcctaggtgtggggtaggctgtaccatctacgtttgcataagtcactctatgatgttcacaccctgacgaaattgcctaaccatgcatttcttagaacttaagaccgtatagatgaccatatagaaaaccagagactgggccaggtgtggtggctcacacctgtaatcccagcactttgggaggccgaggtgggtggatcacctgaggtctggagttggagaccagcctggccaacatggtgaaaccctgtctctattaaaaatgcaaaaaattagccgggactggtggtgggcacctataatcccagatactcaggaggctgaggcaggagaatcacttgaatccaagaggcaaagatcgcaccattgcactccagcgcctggaccacaagagtgaaactccgtctcaaaaaaaaaaaaaaaaaggaaccgggaaggtcatgaaaggagcgtgctcatgcacaaatgcctgataggaacgattgcggaagactctccaaaaaccacaacctcgcacaaagtccactgcaacgttacacagaaagtacttttgtccagtaactgcctgtccaaccttggactgatgccacccttgtttcaagtctcgtagccaaggataattgattcaaaacactttatgtaatcctcctcattttgcctttgaaaacttccccttggctgggcatggtggctcacacctgtaatccaagcactttgggaggctgacccaggcagacccctagagtccaggagtttgagatcggcctgggcaatatggtgaaactctgtctctagaaaagatacaaaaattagctgggcatggtggtgtgcgactgtattcccagctactcaggaggctgaggtgggaggatggcttgaggacgggaagcgggggttgcagtgagccgagattgcaccactgttctccaacctgggcaacagatcgagatcttgtctcaaaataataataataataattattattgttattattatttaaaaatttaaaacttcgccttgcctcaatctcctctttttttttttttttttaagataaggagaggccagctatgcagtggctcacacctgtaatcccaatactttgggaggccaagacgggcagatcacaagatcaggagtttgagaccagcctggccaatatggtgaatccccaactctactaaaaatacaaattagctgggtgtggtggcaggcacctgtagtcccagctactcgggaggctgaggcaggagaatcacttgaaccaggttgcagtgagctgagatcacaccactgcacaccagcctgggcaatagagagagactccatctaaaaaaaaaaacacacacaaaaaaagagagagacataggattgggccgggcacagtggctcacgcctgtaatcctagcatgttaggaggcttaggcaggtggaccacctgaggtctggagtttcagaccagcccagttaacatggcaaaaccccatctctactgaaaatacaaaaattagccaggtgtggtggcacctgcctttagtcccaactacttggaggctgaggcaggagaatcacttgaacccaggaggcagaggttgcagtgagctgattgcatcagtgcactccagcctggatgagagagactccatctcaaaaaaaaaagaagaagaagaaagaaagaaagaaggaaggaagggagggagggagggagggagggagggagggtgggagggaaagaaattattatgtgagataagacaggtggatctcgtgagcccaggagtttgaggccatcctgggcaacataatgagacccccatctctattagaaaataataatagtaaaaataaaaaataatttaaaaagtattacttctaactataatggaactaagctaaaagccaacaataaaatgaaatttagaaaatctctaaatataagaaaactaaacaacatacttgtagatgacctatgtgtcaaagaaggaatctggctaggtgtggtggctcatgcctataatcccagccaagggaggccaaggccagtggatcaccttagatcaggagttcgagaccagcctggccaacacggtgaaaccgtgtctctactaaaaaatacaaacattagctgggcgtggtggctcatgcctgtagtcccagctacttgataggctgaggcaggaggattgcttgaacctgggaggtggaggttgtggtgagctgagatcacgccactgtactccagcctgggtgacagagtgagactccatctaaaaaaaaaaaaaaaaaaaatcaaaaatgaatttagaaaataccttgagctgaataaaaacaaaaacacaggaaataaaaatgtacaggatgctggcaatgtagtaattagcgggaaacttatagcttaaaaaacatattagtgttgagtcagcctggtgaaaattttaaaaaccccaacacattagaatggaaagaaggcctaaaatcaataatttaggcttccacctccaaagctagaaaaagaagagtaaatcaaactcaaagaaaatagtaagaaggaagtaataaagatctaaatggacagcaatgaaacagaaatataaaaacaatagagaaaaagcaatgaaactgaaattggctcattgaaaacatcaacaaaaccggtattgaaaagattaacaggccaggtgtggtggctcacacctgtaatcccagcagtttgagaggccaaggtgggtagatcacttgaggtcaggcgttcgagaccagcccggtcgacatggagaaaccctgtctctactaacaatacaaaaattaactgggcatggtggcacacacctgtaatcccagctggaggctgagacaggagaatcacttgaacccaagaggccgaggttgcagtgagtcgagatcatgccactgtactccagcctgggtgacagagtgagactcttgtctcaaaaaaagaaaagatcagcaaaactgggccgggtgcagtggttcccacctgtaatcccagcactttggaaggccgaggcaggtggatcacctgagatcaagaattcaagaccagcctggccaacatggtgaaaccccgtccctactaaaaatacaaaaattggtggggcatggtggtgggcacctgtaatcccagctactcaggaggctgaggcaggagaatcgcttgaatccggaggtggaggttgatgtgagccgagatcacaccactgcactccagcctttggcgacagagtgaaactctgtctcaaaaacaaacaaacaaacaaacaaactagtatactggttttcaatgaaatcagttagctcattaaaaagttcaacaaaagagtaagaaaaataaaaaagacagaagccctcaattaccaaaagcaagaatgaaggagggaaaaacactaacatggtacacaaattttaaaaaatcacaggggaatattatgaacagatttaggtcaactaattaggcaatttaaatgaaatgaacaaatccctagagagacacaaattaccaaaactgactcaagaacaaaatagaaacacagatacaatttttgtacaagtatccattgaaatgtattgaaaaatgaaaatgacatagaataaacaaaacaattttgagaaaggagaacaaagttgcaaggcatataatgtgactttaagactcactattcactttgggaggtcaaggtgggtggatggcttgagcccaggaattccagaccagcctgggcaacatggcgagaccatgtctctccaaaaaatacagaaattaactgggtgtggtggcatgtgcctgtagtcccagctacttaggagggtgagcccaggaggttgaaaccacagtgaactgtgatcgcaccactgcactccagcttgggaaacaaagtgagaatctgtctcaaaaaaaaaaaaaaagaagaagaagaagccaggcgcagtggctcatgcttgtaatgccagcactttgggaggccgaggtgggcagatcacctgaggtcaggagttcgagaccagcctgaccaacatggtgaaatcccatctctactaaaactacaaaaattagctgggcatggtggcaggcacctgtaatcccagcactcaggaggctgaggcaggagaattgcttgaactcaggaggcagaggttgcagtgagctgagattgtgccattgcactccagcctgggtgacagagagagactccgtcttttttaaaggaaaaaaaaaaaaaaggccaggcgcagtggctcacgtctgtaatctcagcactttgggaggccgaggcaggtggatcacaaggtcaggagttaagagaccagcctggctaacacggtgaaaccccgtctctactaaacatacaaaaaaattagccgggcgtggtggtgggtgcctgtagtcccagctactctggaggctgaggcaggagaatggcgtgaacccaggaggcggagcttgcagtgagcagagatcacgccactgcactccagcctgggcgacaaagtaagactccgtctcaaaaaaaaaaaaaaaaaaaaagagagaaagactcactataaagctacagtaatcaggaatatgctatcatgataaggatagatatataaatcaaggaatcagaagaatgattaagtccagatttaaaacaacaaaaatggtcaattaatttttaacaaaattgccaatataattcaatgaggagaaaaaacagtcacttcaacaaatggtgctgaaataactggacatctatagagtgagaaaagaaccttgacccttaactcataccacacacaaaaattaactaaaaataactaaaaattaactagaaataatatattaactaatgagacaaaaattaactaaagttaggccgagtgctgtgactcacgcctgtaatcccagcactttgggagaccaaggcgggtggatcacctgaagtcaggaattcaagaacagcctggccaacatggtgaaaccctgtctctactaaaaatacaaaaattagccgggcgtggtggcgggtgcctgtaatcccagatactcagtagactgaggcaggagaatcgcttgaacccgggaggtggagattgcagtgagccgagatcacgccattgcactccagcctggttgagaagagtgaatttccatctcaaaaaaaaaaaaaattaactaaggtttaaaaactaaacttaaatgctaaaactataaaccttctacaataaaatgtaaaaagaaatctttgtgacaaatgtttctcacgaagatttcttaagcaaagatttaagtaggtcacaaaagcacactacataacagaaaaaataactgataaaatgaacgccatcacgattagacttttgttctgaggaagacatctttaagaaaataaaaaggctcggtcaggcgtgggggctcacctctgtaatcccagcagtttgagaggccgaggcgggtggatcacctgaggtcaggagttccagaccagcctggccaacatgatgaaaccccatctctactaaaaatacaaaaattagccaggcatggtggcaggtgcctgtaatcccagctacttgggaggctgaggcaggagaatcacttgaacctgggaggagggggttgcagtgaactgagattgtgccactgcacgccagcctgagcgacagagactctgtctcaaaaaataaaataaactaaaaataaagaaaatgaaaaggctagccgggcacggtggctcacacctgtaatcccagcactttgggaggccaaggtgggtggatcacctgaggtcaggagtttgagatcagcctggccaatgtggtgacaacccgtctctactaaaaatacaaaaattggctagcgtggtggcgggcgcctgtaatcccagctactctggaggctgaggcaggagaattgcttgaacctgggaggtggaggttgcagtgagccgagatcctgccattgtactgcagcgtgggcaacaagagcaaaactccgtctcaaaaaaaaaaaaaaaaagaaaaaaagaaaagaaaatgaaaaggctaaccacagaaggagagaaaatattcatattacatatatttgacaaaggaaatatccagaaaatatgaaaagctcttgcaactcaataagaagaaaataaacaatccaattgaaaatgagcaaaagatttgaacaggcgattcacaagagaggatatcgaatggccacaggcatgtcaaataatggtcaagaacattaaaggaaaatgcaaatggaaacagcaatgaaatatcaataaacatccactagaatggataaaattaaaacaaacaaaaaaaccccaaaacctgacaataccaagtattgataaggataaagcttagctgaaatgttcatatactgaaggttgggagtatagagtggttcaatcatactgaaaaatagtttggccatttctttctttttttcctgagcagatcacaaacttgaagtgttttttgttgttgttcattttgttttttgttttgttttgttttggagacggagttttgctctgtcgcccaggctggagtgcaatggcatgatctcggttcactgcaacctccgcctcccgggttcaggcgattctcctgcctcagcctcccgaggagctgggaatacaggcacctgccaccacacctggctaatttttgtatttttagtagagacgaggtttcatcatgttagtcaggctggtctcaaactcctgacctcagattatccacctgcctcagtctcccaaagtgctgggattacaggcatgagccgccacgcccgacctgaaatttcttataaaggtaagcatattgggcagggcacaggggctcatgcctgtaaccacaccattttgggaggctgaggcaggaggattgcttgagcccaggagtttgagaccagcctggagaatacagtgagaccttgcctctaaaaaaaatttaaaaattaggctgggcgtggtggctcatgcctgtaatcccagcactttgggaggccgaagcaggtggataacctgaggtcagcaattcaagaccagcctggccaatatgatgaaaccctgcctctactaaaaatacaaacaattagtcgggcatggtggcacacgtctgtaatcccagctactcgggaagctgaggcacaagaatcgcttgaactcaggaagtggaggttgcagtgaacagagatcgcgtcattgcactccagcctgggtgacagagtggaactccatctcaaaaataaataaataaataaataaataaataaataaataaataaaatcaaataaaaattatctatgcatagtggcatacacccatagtcccagctgctctagaggctgaggcaggaggattgcttgagccaaggtggaggctgcagtgagctatggtggtgccactgcactccagcctcagtgacagagggagaccctggctcaaataataataataataaataaataaacttaaacatacacttatatgacacagcaactcaactcctgggtatttacccaaaagaaatcaaaacatcagcccacaaaaagacttttcatacaatctttattcataaacatccacactggaaacaactcacgtgtacatcaacaggtgaacagatcagcaaactcaggttcacacaatggattacaacccaaagaaatgaactgcatgaagaaaacacacgaatgaacttaaacattatgtgcgctaagcagaagtagccagacttttacaaaaagagtactatacttttctacccagatttatttatttatttatttatttagagaaggagtttcgctcttgtcccccaggctggagtgcagtgacgtgatctcgactcactgcaacctccacctcccaggttcaagcgattctcctgcctcagcctcccgagtagctgggactagaggcatgcgacaccatgcccaaataatttttctattttcagtagagacaggtttcaccatgttggccaggctggtcttgaactcctgacctcaggtgatccacccacctcagcctcccaaagtactggaattataggagagggccaccgcgcccagcctccaccaagttttagagcaggaaaaactaatttaagaagcttgagagtggatcagtggtcaccacccaggtgccaggggtgtggctgggaggggtgatggaaatctcataagtagactctaccttgatcatggtggccacacaatgggatgtgtttgtctaaattcacggaaatgtacactttttaaaattttttttatttacttatttatttttttgagatggtgtcttgctctgttgcccaggctggagtgcagtggcaccatctcgggtcgctgcaacctctgcctcccaggttcaagcgatcctcctgcctcagcccccatagtagctgggattacaggcatgcgccaccacgcccagctaatttttgtatttttagtagagatggggtttcaccatgttggccaggctggtctcgaactcctgacctcaggtgatccacctgcttcggcattccaaagtgctgggattacaggcgtgagccaccccacccagccaaaactgtacactttaaaaggaagaattttactgtgtataaatgacatctcaatgaagttgatattaaaaacaccaaggctaggtgaggtggctcacgcttctgttcctagcactttgggaggctgaggcagcaggattgcttgagtccaggagttcctactgtgtctagccactgtgccaacccttccttgagttcccaattgggaaacttcccaatgaggaatttgatgcctacagaggttgagtgaccctgtccttaaaaaaaaatttttttttttaattagccaggaacggtggtgcgtgcctgtagtcccaggtactctggaggctgagtcaggaggatcgcttgagccttggaggtcgaggcttcagtgagctgggatcatgcccctatgctccagcctgggtgagacagagcaagacgttgtctttgaaaatatataaaaagtggctgggtgcagtggctcacatctgtaatccctgcactttgggaggctgaggtgggtggatcacctgaggtcaggagttcgagaccagcctgaccaacatggtgaaaccccatttctactaaaaatacaaaaattagctgggcatggtggcacacacctgtaatcccaactactcgggaggctgagacaggagaatcgcttgaacccaggaagtggaggttgcagtgagccaagattgcgccactgcattccagcctgggcaatagagcgagactctgtctcaaaaaaaaaaaaaaaaacaaaaacggatatatatatatgtatatacatatatacacacacatatacacatatacatatacacaaacacacacacacacgcacacacacacacacacatatgtataaagtaataaatgaaagcaaacaaaatgtaatttccagaggctaagaccccaaggagaggaatcgcattcacttgggtccaccatctacttgatgtgtgatcttaaaccaattcactcaaccttcgtgggcaccaaattcctcattaggaaactatgcatagaggatctccttcagaaggttgtttcggggattgaaggaatggttagcgcagcggctacacatagtaggaactcagggaatgctgctgggactcacgttcctaagccatgaaaaccgtccagtgggtggagggtgctaccatttatgcatggaggggaagaaactacccgtgcatatgtgcagaggtccacaggggattttctgaaagatacacatgaaatgaagaccagggaaacagcagtattctcccagtaaagaggatagatgtatgtgtacatatatgtgcatatacatatatacacgtatatttataaatgacaaacacacaaaaataacagtataaatctccatttgttatatatttaaattttttgtagcgatcgggctgttgctatattatcaaggctggtctcatacacctggcctcaagcgatgctccgacatcagccttccaaagtgctgggattacaggcctgaggcatcgcgcccagctccaaatctccattctcggtgaaccatttgagaaaaaatcgcaaacatgttgcatctccaaatacctaactatgttttccacaaacagggacaggttcccacgtgcacactgtaaggcacggtgaaaatcgggacattaacacggctgaatcgctaccatctaatccgaaggcccaaccacattcaccacttgtgccaataatatgttcatttcactgtatgttttgaaatgtgtaccacatgtatatgttatctttacgaaaaaaaaaatagtatgttgaaaccactcgtcacagccaaatgaaataagagctaactcattcaagcaggagccccggaggactaaaagaatccggcctctcccaggcctcctcacctgagcagggctccctcctgactaccgcccacccactccagggcaggacgcgggaagagactgcccagcccgagggtcgcaggggcagaaaaccccaggtcctgaacgcgcctgggccccgcggcgaacctggcgtccccaccagacaccagaatcagattcaggccaggccaggaaccaccccagcttcctgcatccgccttggtccaggcagcaatgacggcggcggccgccagggggacggaagctcaagggcggggatccaggcccaagcctgggcgcgcccaccaaggcgtggatccggacgaaggttccggaacagccggtcccgagcacccacgtgcagcttccgatcacagccctggcgtggcttctctgtccccggctaaggcccgcggtcgctgcagggtgcctcgccgagggtgcgggctcggggctcacagtgctcccagcctctcccaccccaaccccgccattaaggggagccccagcgacgccctgaaccctgaaagtcacactggggccggggctgcacttggcgtccgcttcccctcccgtcacagtgaccagggctagggccgcggtcggggccgtcggggagagcggagggcgcgtgggaatggggctcgctgcgccacggaaatcccgcgccgcccttcgagtcctcccagctgctccgcagagccggggccgctgccatcgcgtctgccccgagggtgcgcaggcgggtacctgtcccgactcggggaacagcgggagcccggagacgcccgtcgggcttcccagccccacctgggacgtctctaggggcgggaggccaggagagaagagggtgggagagatgagctgcagggggatacgggacccagggacccgggatcttataacacgctttccacccgtaggattggggcccacaaatgaccagaaaggtgggactcattcgccccctttgcagatggacccatgttggcgccccttagatctgcagtgggggcaccaggacctgcggtgagcgcctctgcgccccaaacgccagcaggtccgcccgaccgcattcccagctggcttgctttgcacaaatgctgcgtcagggcacgccccacacccactccttcccagatcgcgaccctcacgccttcgcagacagaaagtgtcctaagcacaggcaggctcagagcccgcctccgcctcggattcgctgtgtggcccggagccagtatcttggcctctctgggtctcagtttgctcatctcagtgaatgggacacagacacagtcgcgctgcgggctaacgctttatttgccagccaaggccccgggcccgcctgggcttctgctcagaagatcctcacggagtccagctgcacgtccccgcccacctccaccaggcgcacgcgcgccagcggcaggcggtggcggaagtggtggtactgggcgtccccaaccacggcctgcaggggagggtcggtggtgaggattccggaggcccgtgctgggtggccctggggaaatcactcatcccctctgggcctcagtttcctcactgggaaaatggggctattgttcattctaactcttgcgtgaggatcaaacgagttgactgtgtggcacagtaaaaagaggcttttttagtgctggtaatggatattctcatttcagcgaccattacccgctattaaagcgcagaggagggaggtgaattcgcgtaagctgtgggtggtggaggatctgccgccactcccacccgccaatccttgctaggacgagttcctgggcgctgtttccaacccatccctccccatgcctcaaaccccggacctcaggaaggaatgaactgggagtagggtctgggatggcgagtctgggccacgccttcccgctaggacgcccaccccttggacacttggctggtgctcgcctcgtcctgaccctgctgtctctctgtccctcggacccaagtgggagttgtttaggcgagagagagggtcgaaggacacccttctccgccttggccacgacttccctacccccctcaccccgccccgaacctccctgccttccaccaatagcctggctttgcccaaccctctgctccagggacctaagtcttggcgtccacgcccctgtcgcagagacgcaccttgaagccgtcgtctgacgcgatgatgagcacctcgaagggctgcccgcgctggaaaggaacgcccggcccgcgctcctcgcggccccaggagccttgctccttgctgttgaagaccacctccgacgtgtccagccgggggttgaaatgcagcgcggcatcggagccctgctcctccccgcacagcaggtttacatggaacctggaagaggaggatggtggccgtcagggctcagaaaccacccagaccaagaaatgttgagggtgaggaataccgatgtctacaatttactttgaatgaataagtaaatgaaatgttggctgggtgcagtggctcaccctgtaatcccagcactctgggaggtggagaagggaggatcgcttgggcccggaagttaaagaccagcctgggcaacatagcgagaccccaccttacaaaaaaacgaaagaacaaacaaaacataaaccgcccagaccaaagtgaaggtcttatggactggcactccccattcccagagtacccccaaattaacagggacctgaagacaggcacacaccgcagaaggagaggtaggcgactaatgaccagggagcttagattcccaaggcagccaaaatatcatgaggcccttggcagaaacctacccagaccaaactcactacgcttagggcagggtgccctcatttccaaagagcctgggagctgcccaggaggtctgggtgatagccagggtgctcctgatgctcagggaaccctcagcttctacaggacaaagaataataccaggaaccccagtatttccagggtacctcagaatccagaaggcccgaagttccttagccaggaagtcaaaggatggcttggcaaggactcccagggtccagggtgtctccaggacttggagtatttccagagttccctgggactcagacatggaagtcataggactatatctaggaaccctgagattacccagggacctcaaatgcttagggaaacttagggaccccagccacaaaggcacgggggcaaatacgaatacatcagatttgaggtcagaaatggcctcggactcctagcctggtggatacaggtggcctcgggcccctacttctggactgcaaaaattgggagtcagctgatcctgagacctgtaccctttacccctagggcctggggcctcacctgctggcattgggaggaaccaagccgcgaattctcagcaccgtgccagggcggatgccctcgggcagtgaggacttgtgggggacgttctgcaagagtggggtgcaggggccactgtgagccggtgagaccgaaggagggaggcagaaggtgggtcacccctcagaggagccgaccagggctgagactggcagaaatcagtggaagaggaaagggtggcggagaggcaggaaagagaccagaaacagacagggaaacagatggggagagcaacaaagacaaacagaaagatcctcaaagagggccccagaggaagccacaaagaggtagaggggacagtcgggatgggggttacccggaggccacagcccaggccagtccgtggcacactcactgcccacttgctcctttgaaagaggagcccccagccccctccctgcttggccccgccccgggcccctggagcactcacggacatggctgggaccgggttgggcagccgtggtggtggggcctgctggggaccttaaataaaagcagggcggggctggccctgatgactcaccccaccccttcccacccaccacccacacctggcacggaccctggccctggggcaagcccggcgaagcgggagtggcacctcttcttgggggccctgatccccccatcacccagggcccgggtgcactgcccctctcctaggagctgataataagagggaatgtttaatagtaataaactcacagcagagaaggctccttgtgccactgcccctccacccctgtcttcccgctgcctggcacacggagagcctctatctcatttcatgtatttatttgttagtaatttctcttattttatacacagacatattaggtcctgggaggccaatctgggtgggaactccagacccttctctccagctgagaacctcctgcctggactgatccgtgctgaaatctaagcttctgcctctgtaatggaacagcggccacaataggagcactagtgactgacagggtggcttcatgggttcacagggggcctgcctgatcccctcagcgctgcacccctgggtcctggagtgtgcccagttcatggaagtcctcagtcaggaggggtgaaaggaggggatccactaggactatgcctgtcatttccaaggcccctcggctgcccaggagatgcaggaaatcactgattgggaccccatcattccaacagggaggagtatgggtcacccccattgtacagaggaggaggctgaagctgggatgggaagcgatttgccaaaggcaggagcgtgcaggacccgttgccctgacctctggctctcctcacctctgctcgcacctctcctgtgggttctgtctctggggctggctgtctcactctgtccgtctctgcccctaactctgtctaccacatattcctgtcccacttctctccttcaagtctctcttcttcctccttccaggactgctaccatcatgccaccaagtttgtaggtcaggatgaggtgggttttggggtggtgggtggcctagcattccatcaccacctagatcaaaagcagagcaaggcggggaccctcccgccaggcccgaaacagcccccttgggcctaagactctgcaagagaactcagggttggggaattggcttggtggaggggcgggtagggctgaaagatgcttctgaaaggcagggatggtgtgggagctgagcagaaaccactcctagcagcccagcagccctcctggaccttttccactcgccactccagctcctgccccacccagcaggctgctgagaggcctgggcagaggcaggctggcagtggaaagtttgggtggagacagcagacccagaaccatcctccaccctctgcgtcccaggcccccagcctctcgccccctccccacacactccaaggcaccaagctcagggaccagttcttgggaacatgagctcagagagggaggctagcagctgcatttcagtaggggctgcaagcacccccattctgcagaggacaaaactgaggcttagacaggggccacctctcagtcaaggaagaggccagcccctcagctccagaggggtctttgtgccaaggacatgtcatgggcacggacagagaggatagcagggtgtccggtgatcataccaccagcccagctcagttagttcccgagaatgttcccctgaatggtggactccattgttctaacattattgaccattctaaagaagacactctcgcctgggcaacacagcaagacctcatcactacaaaaaataaaaataaaataaaatagcccagtgggttggcgcacatctgcctgtaattccagctacttgggaggctgaggcaggagaattgcttgagcccaggagatcagaggctgcagggagctatgatcacaccacagctctccagcctgggcaacacagtgagacctcagtccacaaaaagaaaagacactccttacattacttgatacatcattctgtaccttgctattgtttcccaagaacatctttttatttatttctatttcttcactgtggctggatatgacttcacacccaaccaacgtgcaagtcccaacttgccttaagtgattggtcaaatggttgcagtcaatctgttaccagtctaaaaggctggctcctttcctgtaactgagatatgcatcctcgatgggctcttattcattagtgttggttatgtttctcatcagttgtgaaacaatattttcttttgttttttttttcttttgttttttttttgagacagaggctcaccctgtcacccaggctggagtgcagtggtgcgatctcggctcgctgcaacctccacctcccgggttgaagtgattctttggcctcagcctcctgagtagctgggattacaggcacccaccaacatgcctggctaatttttttgtttgtttgtttttggttttttttgagacagagtcttgctctgccgcccaggctggagtgcagtggcaccatttcggctcactgcaagctccgcctccctggttcacgccattctcctgcctcagcctcctgagtagctgggactacaggctcccgccaccacgcccagctaattttttgcatttttggtagagacggggtttcactgtattagccaggatggtctcggtctcctgacctcatgatccgcccgcctcggcctcccaaagtgctgggattacaggcataagccaccgcgcctggcctaatttttgtatttttagtagagacagggtttcgccatgttggtcaggctggtctcgaactcctgacctcgtgatctgccctcctcggcctcccaaagtgttgggattacaggtgtgagccactgcgcctggcctgaaataatattttcgtgagccttttttctttttctttctcgttttttgagacagagtctcgctctgttgcccaggcaggagtgcagtggtttgatcttggctcactgcaacctctgccttccaggttcaagtgattctcctgcctcagcctcccaagtagctgggatttcaggtgcctgccaccacgcctggctactttttgtatttttagtagagacggggtttcaccatgttggccagactggccttgaactcctgacctcaggtgatccacctgcctcagcctcccaaagtgctgtgattgcaagtgtgaaccaacgcacctggtcaccttttttcaattttaaatagttaatgtaggccgggtgtggtggtgcacacctgcattcccagctactcgagaggccgaggcaggagaattgcttgaacccaggaggcagaaattgtagtgagccaagatagctccattgcgctttagcctgggcaaaaagaacaagactctgtctcaaaaagtatatataataataataataataataataataataataaatgtatatatttctcaatagtctttctatcaaggtatccttcccataaaataaaagatgcagatattaaaggtatagttcactgattttgagaactgtggagacctatctaaccacctcctcaattaagtttcctggtgtccaggaaatagtggcctctcttctagttccaggaagccactggccagtgtcactcctgaccatttttttgttttgttttgttttgttttgtttttgagatgggggtctcactctgtcacccaggctggagtgcagtggtgcagtctccgctcactgcagcctcaatcttccaagcttaaacctcctgggctcaccacctcagcctcccgagtagctggggctacagacacacgccaccatgcctggctaattgtgtattttttgtagagagagggttttacgatgttgcctaggctggtgttgaactcctggagtcaagcgatctgcctgccttagcctcccaaagtgctgggattacaggcatgagccactgggcctggccactgctgagcattgactagccaccgaggttcttttgtctcaaaataaagaagagggagtagactgatttttcttactttatgcctcttttaggaaataatttagatgaaaagtagctaattgcacactaggtggttgtagagatttaaaattcaggctccatgaatgtcatttgttggtcacattttggttattttttatacacagtgaaggtaattctggggctgctttttgtaaatcaacattctgatgatgaaaatgacacttagaaatctcactttggctgggcacggtggctcatgcctataatcccaacactttgggaggccgaggcgggcggatcacctgaggtcaggagttcgagaccagcctggccaatagggtgaaaccccgtctctactaaaaatagaaaaaattagccgggcatggtggcaggcacctgtaatgccagctacttggggggctgaggcaggagaatcgcttgaacctgggaggcagaggttgcagtgagccaagatcacgccattgcactccagcctgggggacaagatcgagacttcctctcaaaaaaaaaaaaaaaaaggaaagaaatctcactttgttcttggccaggcgcagtggttcaccctgtaatcccagcaccttgggaggccaaggcggtggatcacctgaggtcaggaatttgagaccagcctggccaacatagtgaaaccctgcctctactaaaaataccaaaaaattatatatatctatattagctgggtgtggtggcacacacctgtgatcctagctacttgggaggctgaagcaggagaatcacctgaacccgggagacggaggttgtggtgtgtgatcgcaccactgcacttgagcctgggcgacagagcaagactccatcaaaaaaagaccaaacaaaaaaacaaaaacaaaaacaaaaaaaccccagaaactcactttgttcttaagcttttatgcccattggaaatctcacgactctatttttataaatatagtaaatattaataaaacaatccaattaccgctaagaaaaagtctattctctagtgttcagttccatttataaacttagttaattaaactctcttaaatattttaaactgaatgcataattttagaggttattcatttttcagtgtttcaattgctctataaactcatccaagtaattcttgtaagtttcctagtgattcttgtacatttcaatgcttaaacagtaaaatacatgcatagctttttcttcttccttcctttccttcctttccttcctttccttcctttgctgaacaattgggccctaaagctattatgtggggctgagcaaggtcatggtggccctgaatgggctgattggggtgggatgtccttgggagaggtgtttgggggtcagggctgagcaggatgaggagcgctcagcagaggctgcgcgtaagtgcccagtgagggccagcaggacacgtgacagggagcctgcactcccagcatgggaggaggacacctgtgtggggtgggtgcccgacgaggggcattggaaccagcctcggggggaggtgccatgtgggagtcagagatgaggactggaactgctttttttttctgggagggagttacagatatggaaagggagaggtaggcaccagccctgtggagctggactggaagtggaggcattagcgtgagctaatggtttgaggattgggttatttggtggggcaggtttggactctttttatttttatttaatttaacatatttatttatttatttagacagagtcttctctgccaccaggctggagtgcaatggtgtgatctcggctcactgcaacttccgcctcccaggttcaagcaattctcccacctcagcctcccgagtggctgggactacaggcatgtgtcactgcgcctggctactttttgtatttttagtagagacgggggtttcaccatgttggccaggctggtcttgaactcctgacctcaggtgatccacctgcctcggcctctcgaaatgctgggattacaggcgtgagccttcttataccagtttttttttgtttgtttgtttttgtttgtttgttttttagacagagtgcaatggcgtgatctcgggtcattgcaacaacctctgcctcctgggttcaagggattctcctgcctcagcctctcaagtagctgggattacagacatgcaccaccatgcccggctaattttgtatttttagtagagacaagatttctccacgttggtcaggttggtctcaaactcccgacctcaggtgatccgcccgccttggcctcccaaaatgctgggattacaggagtgagccctgcgcccggcattcttatggtagttttatacccaagcccactgaagaccgtaggagggagaggtaaagttttctttcccctgcaaaggacattcgagttgtttccactgtttggctgttatgaataatgaacgcttctacgaacattttgtttaaatatttagcacgaacatgtttttattccccttgggcatatccctaggagtagaatgcctgggtcccaagggtaacttatgtcacactttcctcccttattcagcagtcagtaaaggctggtaaatttcatctggctgtcctgtcattctctttgaatttggaacaatcatccaccctttttggtttatatgacattgactcttcaaaactcccaactatggccgggtgtggtggctcacatctgtaatcccagaactttgggaggctgaggtgggcggatcacctgaggtcaggcatttgcgaccagcctggccaacatggggaaaccctgtctccactaaaaatacaaaaaattagccgggtgtggtgacgcacgcctgtaatctcagctactctggaagctgaggcaggagaatcacttgaacgcaggagaatcgcttgaacccgggaggcggaggttgcagtgagccaagatcacgccattgcaatccagcctgggtgacagagcgagaccttgtgtcaaaaaaagacatgggaccttcattcaattaagattcatagtatgcagcaagatagaaccccctagtagggagcagtggctcacgcctgtagcactgtgagaggctgaggcaagaggatcgtttgagaccacgagttcaaggccagcctgggcaacatagcaagaccctcatctctagaagaaataaaaagctggacatgaccaggcgtggtggctcatgcctgtaatgccagcattttggaggtgaggtgggtggatcacctgaggtcagaagtttgagaacatggcaaaaccctgtctctactaaaaatagaaaaattagccaggcgtggtggtgctcgcctgtagtcccagctcctcgggagactgaggcaggagaatcacttgaacctgggaggcagaggttggttgcagtgagccgagatcctgcgctccaaccagcctgggcgtcagaaagagaccttgactaaaaaaaaaaatcccctgtttaagacagatggattaattccttctgtttctgtccataggctcttgattgcttcttaggacttctccaaaagtggaagaaacaagaaaacgttgtcattctgaaacatctttactatttttctgaggctgcagccttggccagcccgcaatctgcctttccaggcacagcaggtgacagtgtgagtggataatttgttaccatgtagcaagagacactggctttccaccctgcaatacaggagtccttcctatcagcctctcctctatctcctccagccacgccctcattttaagttctgctgcctgtatcagccacttctcccactgtcatgttggggttgctggttgctggcaacagaaccctcctccgctagtttacagagattattagcggctatgacagcttacagaatttttttttttttttgagacggagtttcgctcttgttacccaggctggagtgcaatggcacgatcttggctcactgcaacctccgcctcctgggttcaagaaattttcctgcctcagcctcccgagtacctgggattacaggcatgagccatcatacccagataattttgtatttttagtagagagggggtttcttcatgttggtcaggctggtctcgaactcccaacctcaggtgatccgcccgccttggcctcccagagtgctgggatcacagacatgagccaccatgcccggcaatagcttacagaattttcagaggactagggaataagcttccgtgctgcaaagctagagggtggatgcggagagcattccctggccagagcttcctaggctgttctagataaaaataaatacctccatcacctaactagccagaaggctcatctccctcccgtaagtgttacctcattttcaccttctaagttttgcaggtggtggagtgcagtggctgatacctgtaatcccagcactttgggaagctgaactgggaagactccttgaggccaggagtttgagaccagcctgggcagcagaggaagaccctgtctctacaaaaaaaaaaatttaaaaatgagccagttttgggccaggcatgggggctcacacctgtaatcccagcactttgggcaactgaggctggtagatcgcttgagcccaggagttcaagaccagcctgagcaacacagtgagaccctgtctctaaaaaaaaaaaaaaaaaaaaaaaaaagccgggcacagtggcacatgcctgtaatcccagctacttaggaagctgaggcaggaggattgcttgaacctgggctgttgaagctgcagtgaggcgagatcacaccactgcactccagctggggtgacagagtgagatcctgtctcaaaaaaagaaaagagtcaggcgcggtggttcacgcctgtaatcccaacactttgggaggccgaggcgggcagatcatgaggtcaggagatcgagaacatcctagctaatacggtaaaaccccgtttctactaaaaaatacaaaaaattagccgggcattgtggcgggcgcctgtagtcccagctagttgggaggctgaggcaagagaatggcatgaacccaggaggcagagcttgcagggagcccagatcacgccactgcactccagcctgggcgacagagcgagactccgtctcaaaaaaaaaaaaagaaaagaaaagaaaagaaaaaattagccaagtgtggtagcacacaaccgttgtcctacctactactccagagactgaggaaaattgcttcagcctgggagttctaggctgcagtgggctatgatggtgccactgcactccaggctgggtgacagggcaaaaccacagagcaagaccacttctttcttggctggctggctttctctttctttctttctttctttctttctttctttctttctttctttctttctttctttctttctttctttcttctttctttctttctttctttctttccttctttctttctttttctttctttctttctttctttcatctctctctctcttccctccttccctccctctctccctccctccctcccttccttccttccttctctctctctttctttttggacagtcttgctctgtcacccagcctggagtgcagtggcacaaattctgctcactgcaacctccaccttctggattcaagtgattcttgtgcctcagcctacccagtagctgggattacaggtgcgtgccaccatgccaggctaattttttgtattttagtagagacggggttttgccatgttgcccaggctggtcttgaactctggagctcaggcaaactgcccacctcagcctccaaagtgctaggattacaggtgtgagccacagtacctggccacgagggcatgtcttcaaaaaaagagttttccaggggtgcaaactcagcttggggaaacccagtcctatgtgaatctagctacaaataactctgggaaatgtagtttttaactgcctaatgcaagaaagcaggccaggctgggtgcggaggttcacgcctgtaatcccagcactttgggaggccaaggcaggaggatacttgagttccagagtttgagaccagcctgggccacatagtgaggcatcagctctactaaaataaaataaaaaaaaaattaactgggggtggtgtcacatgcctgtagtcccagccactttggcggctgaggcaggaggattgcttcagcccaggaggttgaggctgcagtgcatgatgatcttgcctgggcaatagattaaggccctgtctcaaaaaaaaaaaaaaaaaaaaaaaaaaaaaggtgggcccgctggggagtgagttagaagctgagtaagccaatcttcagtggtggttaccaaattacttggaaagatataattagttacatagtgggtaaatgtctttaactgtgggaacagttagaattcactaaaaagatttttacctgtatcattttcatcactggaatgttaatatataaaaccaaaggagtccctgaagtatcttcactgtgtttaaaaaataaccaaaaccacagggcatggtggctcacacctgtaatcccagtactttgggaggccagaagttggaggatcacttaagcccaggttccagactagcctgggcaacatagccagacccttggctaggcacagtagttcacatctgtaatcccagcacttttgaaagctgaggtgggtggatcacttgaggtcaggagttcgagaccagcctggccaacatggtgaaaccccatctctactaaaaatacaaaaatcagccaagagtggtggtgcatgcttgtaatcccagctactaagtaggccaaggcaagagaatcgcttgaacccaggaggcagagctgagattgagccactgcactccagcctgggcaacagagtgagactccatctcaaaagaaaaaaaaaaaagaacccatcaaggacgtagatctgttatcagaaatgagtcaggacttcgggctgataacagagttaatgtgcaaacccttggccaatcagcaaaggcacattgggacttgcagtatgttggctacatgtgaagttacatccagccacagtgaagcaatcactaaaaaaaaatcaaaaataaaacaaaaaacaataactcaaaatatcactaacaaaatggcactgacagaacctggggttttaaatccctacaaacacttagtgtgcgattagttacttttcaactaagttatatcctgaaagaggcctaaaatcagaaaaatcagtctgtcccaacccactttctcattttcacggcaaatgaacttatttttcttttcttttcttttctttttttgagacggaatcttggagtcttgctctgttgcccaggctggagtgcagtggcgcgatcttggctcactgcaagctccacctcccaggttcatgccattctcctgcctcagcctcctgagtagctgggactacaggtgcccgccaccacgcctggctaattttttgtatttttagtagagacggggtttcaccgtattagccaggatggtctcgatctcctgacctcgtgatccgcccgcctcggcctcccaaagtgctgggattacaggtgtaagccaccgcgcctggccttttttttcttttttgagaccgagtctcgctctgtcacccagtcttgagtgcagaggtgcgatcttaactcactgcagcctccgcctcccaggttcaagtgattctcttgcctcatcctccccagtagctgggactacaggcaggcgccacgctgtcgcattggccaggctggtctcaaactcctgacctcaggtgatccgcccgccttgttacccaggctggagtgcagtggtgtgatcttgggtcactgtagcctccacctccagggctcaggtgatcctcctgccctagcctcccgagtagctgggactacaggcacatgccaccacaatggatcaaaggaaactttgtggctactaactgctcaggagtgacagtggcttcatgtggcagaaggagcagtgactgtttctaggggcaccaggaaacttgattggggaggtggttacacaggtgactatatgtgtcaaaactcattgaactattccattaaaatctgaaccctgagcaggggctcacacctataatcccagcactttgggaggccaaagcaggtggatcacttgagtccaggagtttgagaacagcctggacaacatggcgaaaccccatcagtacaaaataatacaaaaattaggcaggtgtggtggcacactcctgtagtcccagccactcaggaggatgaggtgggaggatcacttgaatctgggaggcagaggttgcagtaagttgagatcataccactgcactccagcctgggcgacagaacaagaccctgtctcaaaacaacaacaacaacaacaaaatctgaaccttttatttaatgggaaaaatacctcaatgaaataacaattgggaaataaacacattagttatttaaaaccgaaaaaagacacacaaatattaccgtggccaggcctgtaatcacaacattttaggagaccaaggtgggaggatcgcttgagcccaggagtttgagaccagcctgggcaacatggtgagacctcctctctaggaaaaaaaaaaaaaaaaaaaaaaaagctgggcatggtggcgtgcaactgtagtccaagctactccagaggcgggaggattcccaagcccaggaggccaaggctgcagtaagccatgatcacagagagagccagaccctgtctcaaaaaaaaaaaaaaaaaaaattattgcacaactaatgagaaagataacacaattgaataagaactcatcaagggctggatgcagtggctcatgcctgtaatcccagcattttgggaggctgaggtgggtggatcacttgagggcaggagttcaagaccagcctggccaacatggtgaaaccctgtctctactaaaaatacaaaaattagccatgagtggtggcacatgcttgtaatcccagctactcaggaggctgaggcaggagaatcacttgaacctgggaagcagaggttgcagtgagtcgagatcgtgccactgcactccagcctgggtgacagagcaaaactctgtctcaaaaacaaacaaacaaacaacaacaacaacaacaaaaacccatcaaggatgcaatcaaggatgcagatctgttaccagaaaggagtcaggacttcaggctaataatagagtgaatggaaagctttggccagtcagcaaaggcacgttgggacttgcagcatgttggctgcatgtgaagttacatccagccacagtgaagcgatcactaaaaagttgagttcctgggaaacacggtacacagcatgaggcgtcagtaatgtgaggagtgtgttctttagaatggtcaataatgttagaatgatggagttcaccattcaagggaacattctcgggaactaactgagctgcgctggtggtgtgatcaccggacaccctgctgtcctctctgtccgtgcccatgacatgtccttggcacagacacccctgtggagcccagggcctggccgcttccttggctgagaagctgtccctgtctaggcctcagttttgtcttctgcagaatgggggtgcttgcagctcccactgaaatgcagctgcaagcctccctctctgagctcacgtccctaggaactggtcccccaccttggtgccttggagtgtgtggggagggggcaagaggctgggggcctgggacaaagagggtggaggatggttctgggtctggtgtctccacccaaactttccactgccagcctgcctctgcccaggcctctcagcagcctgctgggtggggcaggagtgcaggagttgggtggggagtggaaaaggtccaggagggctgctgcattgctaggagtggtttatttttatttatttatttgtttgtttgtttatttatttttgagatggagtcttgctctgttgcccaggctggagtgcagtggcgcgatctcggctcactgcaagctctgcctcccgggttcatgccattctcctgcctcagcctcccgagtagctgggactacaggtgcccgccaccatgcccggctaattttgttttgtatttttagtagagacggggtttcaccgtgttagccagtatggtctcgatctcctgacctcgtgatccacccgcgtcggcctcccaaagtgctgggattacaggctttatttttattttttgagacagagtctagctctgtcgcccaggctgcagtgcagtggtgtgatctcggctcactacaacgtccgcctccccagctcaagcaattctcctgcctcagcctcccaggtagctgggattacaggtgtccaccaccacacctggccaattttttgtattttctatagagaaggggtttcaccatgttggccaggctggtcttgaactcctgacctcaagtgatccacctaccttggcctcccaaagtgctgggattacaggcgtgagctaccatgcccagccaggagtggtttctgttcagctcccacaccatccctgcctttcagaaacagatttcagtcctgcccgcccccccccccccccccgcctcccccagtctacttccccaaccctggattctcttctagagtcttgggcccaagcgggctatattggggctggcgggagggtccccaccttgctctgcttttgatctaggtggtgatggaatgctaggccacccaccaccctaaaacccacctcatcctgacctgcaaaattggtgggaagatggtaacagtcctggaaggaggaacaagagagacttgaaggagagaagtgggacaggaatacgcggtagacagttatagacagagacaaacagagccagacagccagccccagagacagaacccacaggagaggcacgcccagaggtgaggaaaggcagaggttggggcaatgggtcctgcccggcttgtggaaaatcacttcccatcccagcctcagcctccttctctgtacaatgggggtgacccatgcttctctctgttggaatggtggggtcccaatcagtgatttcctgcatatcctgggcagcccaagggcctgggaaatgacaagcgtagtcctagtggatcccctcctttcacccctcctgactgaggacttcccatgaacccggcacactccaggacccaggggtgcagcactgagccaaccaggccgccctccgaccctgtgaagtccccctgtctggcactatcgtcgttgttgtggctgctgttccactggagacttagaagcagggatttcagcgcagacatttccagtctaggcaggaggttctcagctggagagaagggtctagagttcccgctgggcttggcttctcaggacccaacatgtctgtggataaaatgagcatgagagactctcctgtgtgccaggcagtgggaagacaggggtggaggggcggtggctcttattatcagctcctaggagaggggcagtgcacccgggctctgggtgatggggggatcagggcccccaagaagaggcgccactcccacttcgccaggcttgccccagggccagggtccgtgccaggtgtgggtggtgggtgggaaggggtggggtgagtcatcagggccagccccgccctgcttttatttaaggtccccagcaggccccaccaccacggctgcccaacccggtcccagccatgtccgtgagtgctccaggggcccggggcggggccaagcagggagggggctgggggctcctctttcaaaggagcaagtgggcagtgagtgtgccacggactggcctgggctgtggcctccgggtaacccccatcccgactgtcccctctacctctttgtggcttcctctggggccctctttgaggatctttctgtttgtctttgttgctctccccatctgtttccctgtctgtttctggtctctttcctgcctctccgccaccctttcctcttccactgatttctgccagtctcagccctggtcggctcctctgaggggtgacccaccttctgcctccctccttcggtctcaccggctcacagtggcccctgcaccccactcttgcagaacgtcccccacaagtcctcactgcccgagggcatccgccctggcacggtgctgagaattcgcggcttggttcctcccaatgccagcaggtgaggccccaggccctaggggtaaagggtacaggtctcaggatcagctgactcccaatttttgcagtccagaagtaggggcccgaggccacctgtatccaccaggctaggagtccgaggccatttctgacctcaaatctgatgtattcgtatttgcccccgtgcctttgtggctggggtccctaagtttccctaagcatttgaggtccctgggtaatctcagggttcctagatatagtcctatgacttccatgtctgagtcccagggaactctggaaatactccaagtcctggagacaccctggaccctgggagtccttgccaagccatcctttgacttcctggctaaggaacttcgggccttctggattctgaggtaccctggaaatactggggttcctggtattattctttgtcctgtagaagctgagggttccctgagcatcaggagcaccctggctatcacccagacctcctgggcagctcccaggctctttggaaatgagggcaccctgccctaagcgtagtgagtttggtctgggtaggtttctgccaagggcctcatgatattttggctgccttgggaatctaagctccctggtcattagtcgcccacctctccttctgcggtgtgtgcctgtcttcaggtccctgttaatttgggggtactctgggaatggggagtgccagcccataagaccttcactttggtctgggcggtttatgttttgtttgttctttcgtttttttgtaaggtggggtctcgctatgttgcccaggctggtctttaacttccgggcccaagcgatcctcccttctccacctcccagagtgctgggattacagggtgagccactgcacccagccaacatttcatttacttattcattcaaagtaaattgtagacatcggtattcctcaccctcaacatttcttggtctgggtggtttctgagccctgacggccaccatccccctcttccaggttccatgtaaacctgctgtgcggggaggagcagggctccgatgccgccctgcatttcaacccccggctggacacgtcggaggtggtcttcaacagcaaggagcaaggctcctggggccgcgaggagcgcgggccgggcgttcctttccagcgcgggcagcccttcgaggtgctcatcatcgcgtcagacgacggcttcaaggtgcgtctctgcgacaggggcgtggacgccaagacttaggtccctggagcagagggttgggcaaagccaggctattggtggaaggcagggaggttcggggcggggtgaggggggtagggaagtcgtggccaaggcggagaagggtgtccttcgaccctctctctcgcctaaacaactcccacttgggtccgagggacagagagacagcagggtcaggacgaggcgagcaccagccaagtgtccaaggggtgggcgtcctagcgggaaggcgtggcccagactcgccatcccagaccctactcccagttcattccttcctgaggtccggggtttgaggcatggggagggatgggttggaaacagcgcccaggaactcgtcctagcaaggattggcgggtgggagtggcggcagatcctccaccacccacagcttacgcgaattcacctccctcctctgcgctttaatagcgggtaatggtcgctgaaatgagaatatccattaccagcactaaaaaagccgctttttactgtgccacacagtcaactcgtttgatcctcacgcaagagttagaatgaacaatagccccattttcccagtgaggaaactgaggcccagaggggatgagtgatttccccagggccacccagcacgggcctccggaatcctcaccaccgaccctcccctgcaggccgtggttggggacgcccagtaccaccacttccgccaccgcctgccgctggcgcgcgtgcgcctggtggaggtgggcggggacgtgcagctggactccgtgaggatcttctgagcagaagcccaggcgggcccggggccttggctggcaaataaagcgttagcccgcagcgcgactgtgtctgtgtcccattcactgagatgagcaaactgagacccagagaggccaagatactggctccgggccacacagcgaatccgaggcggaggcgggctctgagcctgcctgtgcttaggacactttctgtctgcgaaggcgtgagggtcgcgatctgggaaggagtgggtgtggggcgtgccctgacgcagcatttgtgcaaagcaagccagctgggaatgcggtcgggcggacctgctggcgtttggggcgcagaggcgctcaccgcaggtcctggtgcccccactgcagatctaaggggcgccaacatgggtccatctgcaaagggggcgaatgagtcccacctttctggtcatttgtgggccccaatcctacgggtggaaagcgtgttataagatcccgggtccctgggtcccgtatccccctgcagctcatctctcccaccctcttctctcctggcctcccgcccctagagacgtcccaggtggggctgggaagcccgacgggcgtctccgggctcccgctgttccccgagtcgggacaggtacccgcctgcgcaccctcggggcagacgcgatggcagcggccccggctctgcggaacagctgggaggactcgaaggacggcgtgggttttccctggcgcagcgagccccattcccacgcgccctccgctctccccgacggcccggaccccggtcctagccctggtcactgtgacgggaggggaagcggacgccaagtgcagccccggccccagtgtgactttcagggttcagggcgtcgctggggcttcccttaatggcggggttggggtgggagaggctgggagcactgtgcgcctcgagcccccaccctcggcgaggcaccctgcagcggtcgcgggtctctcaaccggggaccgaggagccaggccagggctgcgatcggaagctgcacgtgggtgttcagggccggctgttccggaaccttagtgcagagccacatcttggtgggcgcgccaggccttgggtctcgatccccgcccttgagcctccgaccccctggcgtccgccttccgcattgctgcctggaccaaggcggatgcaggaagctggggtggttcctggcctggcctgaatctgattctggagtcaggtggggacgccaggttcgctgcaggtcccaggcgcattcaggacccggggttttaggcccctgcgaccttcggtctgggcggtcccttcccgtgtccggccctggagtgggtgggcggtggccaggagcgagcccagctctggtgaggaggcctgtgagaggccggtttctcccagtcctccggggctcctgcttgaatgagttcgctcttatttcatttggctgtgtcgagtgtttttaaaatatcagttttttcataaagataatatatgcatctggtatacatttcaaaacatacagtgaaatgaacacacattattggcacaagtggtgaatgtggttgggtcttcggattagacagtagcgatccagccgtgttaatgtcctgaatttcaccgttgactgacagtgtacatgtgggaacttgtccctgtttgtggaaaatagagttaggtatttggtggtgcagcatgtttgcgacttattctcaaatggttctgaggcaggaaaatagggtctggaggcagggaacataaggctgattcacacttcagctatgacaggaaacatcctctccatttacatagggcgtacagcaagtaaccaatggaaacctctagaaggtatttaaatgccaaaaaattatgtaacccagcccttgagcccctatgctccgccgcacccacactgtggggtgtatttttattttcaataaatctctgcctttgttgcttcattatttccttgctttgtgcgttttgcccaattcttcattcaagagaccaagcacctggacaccctccatcggtaacagttcatcaaaaatttttaaataaaaaattttttttgttgaggcagggtcttgctctgttgcccaggctgagtggagttgtggataagggcttactgcagcctcaacctcccaggctgaagccatcctcccacctcagccccccaagtagctgagactacaggcacgtgccatggtgccaggctaatttttttggggggggcgggtgtttgtagagccagggtcttgctatgttgcccaggctggtcttgaactcctggactcaaactcctgagctcaagcgatcctcccaccgaggcttcccagagtgctgggattacaggtgtgagccatggtgcccaacctaaatccttctttattaagtttgtcttcaaagaaatttagaatttatgattcagcttcccttctctcctccccatcctcctggatctttctgtaacagctctattgacatataactcatatgctatacaagtcacccattcaaagtatacaagtcaatgtttttcagtatattcacaaggttgtgcatccatcaacacaatctaattttagaacatttttatcatctcaaaagaccttggctcacagatgtaatcccagcactttgggagcctgaagcggaaggattgattgagcccaggagttcaagaccagcctgaggccgggcgctgtggctcacacttgtaatctcagcactttgggaggctgagatgggcggatcacttgagctcaggagctcgagactagcctggccaacatggcaaaaccacatctctactcaaaatacaaaaaattagccaggcgtggtggcacgcacctgtaatcccagctacgtgggaggctgaggcaggagaattgcttgaacccggtaggcggaggctgcagtgagcagatagcaccattgcactccagcctgggtgacagagcaaagctctgtgtcaaaaaaaaaaaaaaaaaaaaaaaaaaacaacctgggaaatatagggagacctcatctctacaaaaaataattttagctgggcatggtggtacacacctgtggtcccagttactcgggaggctgagctaggaggatggcttgagctggagaggtcgaggctgcagagagccgtgatcgctccactgcactccagcttgagcaacagagtgaaaccctgtttcagaaacaaaacaaaacaaaaaagaacaactaaaagaaaccccatacccataagcagtcactccccaacttgcccctcccccagcacctggcaatcactaacctactttccagctgtatggatttatgaatctgcttgttttccacacgtggaatcatacaatatgtggccctgtatatctggcttcttccacggagcatcatgttttcagggtttgtccatgtcatagcatgcatcagcacttcattccttttcatggctgaatgctgttccaatgtgtggatcgaatatacgcgtttacccattcatcatggtgaataatggatatctgggttgttcctacatcttggctattatgaataatgctgctatgaacctattgtgtgaacatgttttcatgtctcttgggtaagtacctaggagaatttctgggtcaggccaggtgctgtggctcatgcctgtaattccaccactttgggaggccaaggcagatggatcacctgaggtcaggagttcgagaccagcctgatcaacatggaaaagccccatctctactaaaaatacaaaattaaccgggcgtggtggtgcatgcctgtaatcccagctacttgggagactgaggcaggagaatcgcttgaacccaggaggtggaggtttcagcgagccgagatcgcaccactgcactccagtctgggcatcaagagcgaaactccgtctcaaaaaagaaaaaaaaaaaaagaattcctgggtcacatgactcttttaagttccgtttcaaagaactgccaaaccattttccaaagtaactgtaacattttacattaccatcagcaacatatgtgttcctatttctccatgttctctccaacacttgttattgtcttttttttttttttgagacagggtcttgttctgttgtgtaggctggagtgcagtggtgaaatcatggctcactgcagcctccacctcctgggctcaagcaattctcctacctcaggcctcccaattagttggaactataggtgtgcgtccccatgcttggctaatttttaaaaattttttgtagagacaggttcttgctatgttgcccaggctggtcctgaactcttagcctcaagtgatcctcccaccccggcctcccaaagtgctgggattacaggcatgagccaccacacctgacctatctgtcttttttattatagccatcctaataggttggcttcaccacttggtgaagagatatgtcatgtggttttgatttgcatttccctaatgacatgggttgccgtttatatatcttctttgcagaaatgtttatcgaaattttctgcccattttaaattggatttttaaaaggtgttatataatcttatccataaatatgtgtataattctaaatgatatttattttttaatttttatttttgagatggggtctcactatgctgcccaggctggtctcaaactcccaggttcaaacagtcttcccaccttagcctcccaagtagctaggattacaggcatctgccaccacgcctggcaggctctctttttaaacaaaacctcattaccattctaactcctaaaaaatttacagttcatatcattgtatgatacaatgtttgcaaagtttgtatgcaaaggtttcccccaacattttattatgaattttttcagacatgcagaaaagttaaaagaattattctatgaatacctcatataccctaaccagattctatataacattttactcaacttgctttatcacacatagatccatctatccacccttctatccatccatcaccatcttctttttttcttttcttcttcttctttttttttttttttttgagaggagtctcactctgttgccaggctggagtgcagtggcgcgatctcggctcactgcaacctctgcctcccaggttcaagcgattctcctgccccagcctcccgagtagctgggattacaggcacccaccactatgcccggctaattttttgtatttttggtagagacagagtttcaccacgttggccaggctagtctcaaaaattcctgaccttgtgattcgcctgcctcggcctcccaaagtgttgggattacatgcgtgagccaccacacctggccaaaaaatatggaacacttcacaaatttgcatgtcatccttgcgcaggggccatgctaatcttctctgcatcattccagattttagtatatgtgctgctgaagcgagcactatttctttattttattttaatattttgtatttttgtatttttgtattttttttttattgatcattcttgggtgtttctcgcagaggggggatttggcagggtcacaggacaatagtggagggaaggtcagcagataaacaagtgaacaaaggtctctggttttcctaggcagagtgtgtgtgtccctgggtacttgagattagggaatggtgatgactcttaacgagcatgctgccttcaagcatctgtttaacaaagcacatcttgcaccgcccttaatccatttaaccctgagtggacacagcacatgtttcagagagcacagggttgggggtaaggtcatagatcaacaggatcccaaggcagaagaatttttcttagtacagaacaaaatgaaaagtctcccatgtctacttctttctacacagacacagcaaccatccgatttctcaatcttttccccacctttcccccttttctattccgcaaaactgccattgtcatcatggcccgttctcaatgagctgttgggtacacctcccagacggggtggtggccgggcagaggggctcctcacttcccagtaggggcggccgggcagaggcgcccctcacctcccggaccgggcggctggccgggcagggggctgaccccccacctccctcccggacggggcgtctcgcctggcggggggctgacccccccacctccctcccggacggggcggctggctgggcagggggctgactcccccacctccctcccggacggggcggctggccgggcagaggggctcctcacttcccagtaggggcggccgggcagaggcgcccctcacctcccagacggggtggctggccggggcggctggccgggcggggggctgacccccccacctcccttccggacggggtggctgccgggcggagacgctcctcacttcccagacagggtggcagccgggcggaggggctcctcacttctcagatggggcggttgccaggcggagggtctcctcccttctcagacggggcggccgggcagagacgctcctcacctcccagacggggcggcggggcagaggcgctccccacatctcagacgatgggcggccgggcagagacgctcctcacttcctagatgggatggtggccgggaagaggtgctcctcacttcctaggtgagatggcggccgggcagagacgctcctcactttccagactgggcagccaggcagagggactcctcacgtcccagatgatgggcggccaggcagagacgcacctcacttcccagacggggtagcggccgggcagaggctgcactcttggcactttgggaggccaaggcaggcggctgggaggtggaggttgtagctgagatcacgccactgcactccagcctgggcaccattgagcactgagttaacgagactccgtctgcaatcccggcacctcgggaggccgaggctggcggatcactcgcggttaggagctggagaccagcccggccaacacagcgaaaccccgtctccaccaaaaaaatacgaaaaccagtcaggcgtggcggcgcgcgcctgcaatcgcaggcactcggcaggctgaggcaggagaatcaggcagggaggttgcagtgagccgagatggcagcagcacagtccagagggagaccgtggaaagaggagagggagagggggagggggagggggagggagctattttgtatttttttagaaacagagttttgctctgttgtccagactagagtgcagtggcctgattatggttcacggcagcgttgaactcctgggcacaagccaacctcctgcctcagcctccctagcagctggaactacagatgtttgctacatctggcttacttttttattttttgtagagacagggtctcgccatgttgcccaggctggtcttgaactcctgggctcaagcaatcttcccacctcgtctcccaaagtgctgggattacaggctcatgccatcgcacccagccatcattttatttacttatccattcgaagtaaattgtaaacatcagtatttgtcacccctaaacatttcagaagtacatcattagctagagtacaatatttgtttatgattctttccttgtggtaagctttgcggaaagattctttgtttatattggtgaaatgcacaaatctaaaatgtacagttggctgggcacagcgactcacgccggtaatcccgacactttgggcggctagggcaggagcattgcttgagcccagggagtcgagatcagcctgagcaacataaggagacccccgtctttataaatatatatatttttaattagctgggcatggtggtgcacacctgtggtcccagctacctgggaggctggagtgggaggatcacttgagtcccagaggttgagcctgcaatgagctgtgatcacaccactgcactccagcctgggcaatagagtgagatcctgtctcaataaaaacaaaaataaaaagaatttaataaaataaaatatacagccaatgagttctaacaaatgcacagagctgtgtgacctagggtatggaacatatccatcactccagaaagttgctttagacatgcaaacatttaaacttagtttgagtcatgctaataaccggttttacagcattttatccaattaataatatagagggtttaattcgtcacttcatggtttgtcctgaagcttgctaacccattacatcagaaagccaacccagctaatttgaaagtggatgagtcagtgactggtgaataagtaaacacgagagtgaataaagaatagatggatgaatgaaaatgtaaagaaatcagctgggggcagtggctcacgcctgtaatcccagcactttgggaggccaaggtgggtgtatcacgagtcaagagattgagaccatcctggccaacatggtgaaaccctgtttctactaaaaatacaaaaattagctgggcatggtggcgcatgcctgtagccccagctactcaggaggctgaagcaggagaatcacttgaacccatgaggcggaggttgcagtgagctgagatggcaccactgcactccagcctggcgacagagcaagactccgtctcaaaaaaagaaagaaaaaaaagaaagaaatcaatgaatgggccaggcacggtggcccacgcctgtaatcccagcactttgggaggcggaggcaggcgcaccacctgaggtcaggagttcaagaccagcctggccaacatggcaaaaccctgtctctactaaaaatacaaaaattagctgggcgtggtggtgggtgcctgtaattccagctactcaggaggctgaggcaggagaattgcttgaacgggagatggcagttgcagtgacctgagacagcaccattgcactccagcctggatgacaagagcaaaactctgtctcaaaaaaaaaataaataaaaataaaaacaagaaatcaatgaatgatgaaatcagcaaaagagtgatttgatgaaagcatggttgggtggacagatggagagaagaaaatataaatgaatggataactttccagcttgagttggaaaagggttggaaaaaaatagataatgaagagatgaatggataattggatagaaagagatggaaaagtgatgaattgctgaatggagggatgaatgggcatatggaggacaaatggatgactgtgatggaaagcagagaattacatggacaaatggagggatgaataaatgaatggatggacgaaagttagacttcgtaaggatggctgaatgaatagacagatagactggtatatggttagatgtttggatggatggagaagatgatggatgatcagatgcatgggtgatggataaaaggttgaatgaaagaatggatggataaacagctggatagagctagacagactggtgagtagatgaatagttgcatgtttggatgaatgggtgaacatatggttgactggatgtttggagagattgacgatgagatgatgagtgcagaggtaaatggatgggtagatggataaagggttggatgaaaggatggttgaacaatcagctcaatggatggattgatgaggtctagatggttggatgtttgattgatggatggttggatggacttttggttggatacatggagagattgatggatgttgggatacacgagtggagagatggatgcatggatggatggaacgacaggctgtatagtggttaagtgtgcagatccttgggagccagatcagctggatttgaatcctccttctgccatttatgcaatgtataatttgggcaatttgttttattttcctttgtttcctcatctgttacagagggatgataataattgtttctacctcttggggttgctgtgagaagtgaatgagccctaaatcagtgcttggggcataaccagatttatgatgacaggaggatggatggtcagatgactggatggatgaaggatagatgaagtgcatgactgaaccaaggaagggaagagtagccggggagcagatggagacacacactcatgagacaccctcagacattttattaggggcttagaaaggagtcctaggggataattctgttttcccatgagttatggccccaggaatagattagatctggacataggacaaggtgacatcaccctggatttccaatgtgtccaccctctggaaggccgagaggcgatgggcaaagtcaaagaggtgctggccattggcgtaaaccttgaagcgatccaagccacagcgaatggacagctgcagggagaagggtgggcatgaggccagggccaggactgaggccctggaaggaagtgggaaaagagagctcagactcacatcaaagaactgtccgggaccaaatgggttgtgggtgatcttcttctcctcggatccccacgagccattcagaaggctgttccggaccacggtaccgttgcccatgcggggattaatgtgcagagctatgtcccctgaggagcccaccttgaagttgatagcaaagctggggacagagagggatgggggagtcagatggagtccagtgggaagaggccagtgggctggacctctgaatccctaaaggaggaggggacagagggtctagattgttgggtctgagggaggagggggctgggggttcccacctagtttacgttatacctcttgcctgtgggaggcacatagcccttgatgatgatggttcttcgagctgtgagccctccttgcagcctcccgaaatatggcacaggctgtgggaagagaacggggggtcccattctctctcagcttagcagagccagatgtgggaagaaattttctttttcttttcttttctttcctgtctttttttcttataagagatggggtcttactctgtcacccaggctggagtgcagtggcatgatcaagcctcactgcagcctcaaactgctgggctcaagcaatcctcccatctcagcctcccgaagtgctgggattacaggcgtgagccaccacgcccagccttgcaggaacaaaggaacaaattttgtttttttttttaggcagagtctccctctgacgcccaggctggagtgtagtggcataatctcagctcactgcaacctctgcctcctaggttcaagcaattctgctgcctcagccttcctagtagctgggattacaggtgtgcgccaccacacctggctaacttttgtcattttagtagagacggggattcatcatgttgaccaggctgatctggaactcttgacctcaagtgatccacctgccttggcctcccaaagggctgggattataggcatgagccaccgtgtctggccaagaataaattttctttttcttttctttttctttttttttttttttttttttttttgagatggagtctcgttctgtcaccaggttggagtactgtggcacgatcccggctcactgcaacctccgactccctggttcaagcgattctcctgcctcagcttcctgagtagctgggattacaggcgcgcgccaccatgcccagctaatttttgtatttttagtagagacagagtttcactatgctggccaggatggtctcgatcgatctcctgacctcgtgatctgtccgccttggcatcccaaagtgctgggattacaggcgtgagccaccatgtccagcccaagaacaaattttctgagaggtcccactcctcctggaaaacatccccaattccttctgctccctaaacctgaccacgaactctatctacccttcccctacctcccaccccaaaaccctcagcccactccctttctggctgtctcagattccctggagatccgtgccccctccccaccatccatctctgtttccccaagccataccgggttgaaggttgggggtccttccatggtctgtgaagtgaggaagaagcgatattattctccaagagtcgacagatatctatgacacacccattagactccggcgtttctctaggtgctgggttagtacaccttgggctgcaacccctcttagctccccctaccccaattctcaccattcccactcctcacccggggccctcccagccctcccactcacgggcaggctgttcagctgttgatggcaatgtccgggaccctgaacgatggacagaaggcaggaagggtgagaggggctgagggaccccactagggaggaagaccctcacctatcagcaagtacttacagggtaaggtggcatcatcgggggtccctgtgggcacagaaagagaaagcggttatgagagggtccccagatttgcgactgaaagatgtcgagagtgcctgccctggggtggcccaccaccaccaccactatgccagagaactctggcatcaaagggtggcaccccgatcacagattcacggagaggggcaccccatgttctgggatcgctgatgcccagtgagtcaccccaaagctttaggacaatgcttggtccattttgttctctgtgcccttccccttgctgtcttcctgctgtcccggggccctcactcgctgatcttgatctcagtttctgcctctgtccctgtgtctctgcctctctctctgtcttggccacacctcagcgcaggggcttccttctgccaaacacttttatttatttatttgagatggaatttcgctcttgttgcccagggtgccgtgcagtggcacgatctctgctcacctcaacctctgcctcctgggttcaagtgattctcctgcctcagcctccggtgtagctgggattacaagcatgcgccaccacgcccagctaattttgtatttttaatagagatggggtttctccatgttggtcaggctggtctcaaactcccgacctcaggtgatccgctcgcctcaccctcccaagtctaacacctttaacttttactctctctctttctctctgttaccttctcttttctcctccttgtaattaactccattctgccttgacttctattctcagccagctattctgaaggccttttaaaagtagctttatatagccgggcgtggtggcaggtgcctgtaatcacagctacttgggaggctgaggaagaattccttaaacctgggaggcagagggtgcagtgagctgagatcatgccactgcactccaacctgggccacagagcaagactccatctaaaaaaaaaacaaaaaacaaaaaacaaacaaacaaataaacgtagctttataagccgggggctgtggctcacgcctgtaatctcaggactttgggaggctgaggtgggtggatcacctgaggtcaggagttcaagaccagcctggacaacataggaaaattcctcccctctgtctttacaaaaaatttaaaaactagctggggctggtggtgcgtgcctgtagtcccagctactcaggagactgaggtgggaggatcacttgaacccaggaagtcaagaatacagtaggctgtgattgcaccaccacactccagcctgggtgacagagccagaccctgcctcaaaaataataataataataataataataataataataataataatattgataaactcaatttaattgtatgttatttatttttaatgattgtgttaagcaacctctagggaattcattcactatcgtgtgttctttgcctttccttatcctcactttctgactcaccttacacacttcctcctactccaggaagcacttccttcctgacccatgactagtcaagcccttcctgtaggctcccaaacctcctgtatactccatatcccagcccctgcccctctgcctgtgccctccctatcacagacctgaccatttctgggctgtcactctctgatgccatgtctgtgagcccagtgaggtcagggcccagagatatctcagtcattcctgtctccagccctgggcctgacccctctgcctgcctccacccaccctcctgtcctggccctgatccctctgtctgggcccaaacccaactgcaacccttcagccagggcctccccatcccggcctttatcccttgcagtgatgggtctgtcttcccagtgggatcccttgatcatcactgggctcttggcataactcagcagagggagatgcttgggaaataaatgaatgtggaatgcgctgggcaccatggctcacacctgtaatcccagcactctgggagactgtagccagcagatcacttgaggccaggagttccagaccagcctggccaacatggtgaaaccccgtctctactaaaaatacaaaaattagccagatgtgatggtgggtgcctgtaatcccagctacttgggaggctgaggcaggagaattgcttaaaactgggaggcagaggttgcagtgagccagaatcacaccactgtactccagcctgggagacagagcaagactccatctcaaaaagaaaaaatagaccaactgcggtggctcacgcctgtaatcccagcactttgggaagtcgaggtgggtggatcatgaggtaaggagatcgagaccatcttggctaacacagtgaaaccctgtctctactaaaaatacaaaaaaattagccgggcgtggtggcaggctcctgtagtcccagctatttgggaggctgaggcaggagaatggcgtgaacctgggaggcggagcttgcagtgagccaagatcgcgccactgcactccaacctgggcgacagagtgagactccgtctcaaaaaaaaaagaaaaaaagaaaaaaagaaaaaaaatgaatgtggaactgaatttagaaagaaaggacgcaagaagggatgggacccctcacacctggggccggaggggctggcctccgatgaagttgattgattgaagttgcagatccccatccacttgcaggtgggtgaccatctgtaggggaagccggtgcccgtactcatagaagggatttccatttaccaccacctggagggcagagatgggaggtcaggagtcagcacccatgatcctgggaaggtacaaacaggaagcaagggcagggcaccctggctcacgcctctaatcccagcactttgggaggctgaggggggtggatcatttgagatcaggagtgtgagaccagtctggccaacatagtgaaaccccatctctactaaaaatacaaaaattagccaggcatggtggcgggctcctgtaatcccagatactcaggaggctgaggcaggagaatcgcctgaacccgggaggtggaggttgcagtgagtggagatcacgctgctgcactccagcttgggtgacagagcaagactctgtctcaaaaaaaaaaaaaagcaaggatcagggatctttttcattgggagtcgatagtcttggggatgagctgggacagcctcagcatcaggaaccttggagtccacagctcagaggtcaagctaaggtcaaaaatcagctcactggccgggcgcagtggctcatgcctgtaatcccagcactttaggaagccaaggtgggggatcatttgagatcaagagttcgagaccagcttgagaaacatagcaagaccccgtctttacaaaaatatacaaaaattagccgggcgtggtggtgtgcacctagagtcccagctactccggaggctaatgtgagaggatcacctgagcccggggaggttgaggctgtagtgagctgtttgcatcactgcactccagcctgggcaacagagcgagacccagtctcaagaggaaaacaaaaagtacacgttttgcaaaaaacacaaagtggtaggaggaaatacacatgaaatgtattacaagactctcagcagtagggtaatgggactaaggaaaagcgctaaaagaggatttttaaaaataggcaggaaacggccgcccttcgtctgggaggtgaggagcgcctctgcccggccgccccgtctgggaagtgaggagcgcctctgccaggccgccctgtctgggaagtgtacccaacagctccgaagagacagcgaccatcaagaatgggccatgatgacgatggcggttttgtcgaaaagaaaagggggaaatgtggggaaaagaaagagagatcagattgttactgtgtctgtgtagaaagaagtagacatagaagactccattttgttctgtactaagaaaaattcttctgccttgagttgctgttaatctgtaaccttaccctgtgttccctgagacatgtggtgtgtcaactcagggttaaatggattaagggctgtgcaggatgtgctttgttaaacagaggcttgaaggcagcatgctccttaagagtcatcaccactccctaatctcaagtacccagggacacaaacactgtggaaggccgcagggccctctgcctaggaaaaccagagacctttgttcacgtgtttatctgctgaccttctctccactattatcctatgaccctgccacatccccctctctgagaaacacccaagaatgatcaataaataaaaataaataaataaataaataataaaataaaataaaataggcaggaaagaaggaaaagaaaagaaagaagttgacataaaaagtggggatggaaaaaggaaataaatgaaggagggaaggagagagaaggaagaagagaggagggaagggggaaggaaggaggggaggaaagaggagagaacagagaaagaggaaggaaaaagaggaaaaagaaggaaggggctgggtgtggtggctcacgcctgtaattccagcactttgggaggccaaggagggcagaacacctgaggtcgggagttcgaggccagcctgggcaacatggtgaaaccccatctctactcaaaatacagaaattagctgagcgtggtggcacgcgcctataatcccagctactcgggaggctgaggcaggagaagctcttgaacccagcaggcagaggttgcagtaagctgagatcatgccactgcactccagcctgggcaacagagtgaaactccatctcaaaaaaaaaaaaaaaaaaaagaaagaaagaaagaaaaggaaggaaggcgggaaggaaggaagcagccaagatggcgccactgcactccagcttgggaaacaagagagaaagcatgcagaccttgtagtgctcagccaggactatgaagaccagctcaaaggcggcaccctttttgaagggcatgctcctcttcctctcctcgctgccccacttcccgccctgcaacgtgttgaagaccaccttgtcccagccgtcaaaccgcggattgaagtggaaggcgacgtctgagcccggatcctgcccaaccacaaagttcacgaagaacctggcgggacacaaagggctcattcccctggtgccacctcccggggcctgggggcctcctccaggaagccctctccctgccgccctgtcctcggcctccctggcccggacctcagcaccagctctgaggggcaaccttggcactgtgggccacagcgtggagaggacctgagttctgaggggggcagattcccaccaccacaccttcgctcacagcctttccttctttttttttttttttttttttttgagatggagtcttgctctgttgcccaggctggagttggagtgccgcgatctcagctcactgcaacctccgcctcctggattccagtgattctcctgcctcagcctcccaagtagctgggattacaggcgtgcaccaccacgtccggctaatttttgtatttttagtagagacagggtttcaccatgttggccaggctgatctcaaactcctgacctcaggtgatccacctgcctcggcttcccaaagtgctgggattacaggtgtgagacaccgtgcctgacattttttttcttgagacagggtcttgtgttctcaccctgtcccccaggctggagtacagtggccacgatggtggctcactgcagcctcaacctcctgggtcaactgattctcctgcctcagcctccctagtagctgggactacaggtgcatgccactatgcctggcttttttttttttttttttttttttttgtagagatggggtctcactatgttgccgaggctggtctcaaactcccgggctcaagcaatcctaccacctcggcctctcagagtgctgggattacaggtgtgagttgctgtacccagcccaccttgccttcttagaccacctcctccaccctcttcccaacttccagttatgactgttacaagtctgccacgggccaggccctgtcctatgcactttgggtctccctgctcccctcctggccctgaagatcatttccctcatgcagccagagggtccctgtgtacacccatgacgcatcatattccgcacccctgggcacaccagcatccttgaaattactccccaggacaggcctgtctcagggcctttgcactggctgttccctctgcctggaaggcccttccctcagctgtccctggggatccctctctccgttccttctgttctttgctgatatgttcccttcccaggcaggccttctctggccacctttttaatttttttgagacagtctccctttgtcacctaggctggagtgcagtgatgcgatctcagctcactgcaaactctgccttcaggattcaagtgattctcccacatcaggctctcaagtagctgggattacaggcacctgtcaccatgcctggctaattttgtattttcagcagagatgagatttcgccttttttttttttttttttttttttttgagatggagtctcgctctttcgcccaggctggagtgcagtggcgcaatcttggctcactgcaagctccgcctcctggtttcacgccattctcctgcctcagcctcccgagtagctgggactacaggcacccgccaccatgcccagctaattttttgtatttttagtagagacggggtttcactgtgttagccaggatggtctcgatctcctgacctcgtgatccgcccgtctctgcctcccaaagtgctgggattacagacgtgagccaccacgcccagccagatgcgattttgccattttggccaggctagtctcgagctcctgacctcaggtgatctgcctggcttagccacccaaagtgctgggattacaggcgtaagccaccatgcccggccaggccaccctatttaaggggacaatttaaagggaacctctgtccgcacatacactccccatctcccttccctcctcattttcttcatagcacttaatatcatctgacatcttacatatttgactttttttttttttttttttgagacagagtctcactcttgttgcccaggctgtagtgcaatggcacgatctcggctcaccgaaacctccacttcccaggttcaagtgattctcctgcctcagcctcctgagtagctgggattacaggcatgcgccaccacgccctggtaattttgtatttttagtagagacagggtttctccattttggtcaggctggtcttgaactcccgatctcaggtgatctgcctgcctaggcctcctaaagtgctgggattacaggcctgagctaccgcgcccggcctggacttattttttatgtttcccctactaggacatcagctccacgagggcaggggtctctgtcctgttcactcctccatccctagtgccaggacacagaataggcactcagtgaagaagtaaacaataaataaataaacaacaggctgggcagagtggctcataccagtgcctgatcctcccagcactttaggaggccgaggctagaggatcgcttgagcacaggagttcaagaccagcctgggcaacataacaagactttgtctctacaaaacaaataataataataaataaaaattaaaaattaaattagttgggcatggtggcacatgtctgtagtcccatctgcttggaaagatgaggtaggaggatcactttagcccaggagttggaggccgaagtgagctataatattgtgccactgcactccagcttgggcaacagagcaagaccctatctctaaggaaaaaaaaagtcctatgaggccaatcattatcaacgtgttaaggccctttttaaaaagctaagactgggccaggcgcagtggctcacgcctgtaatcccagcactttgggaggccgagatgggaggatcacttgaggtcaggagttcgagaccagcctgaccaacatggtgaaaccccatctctactaaaaatacaaaaattagccagtgtgctggcacatgcctgtaatcccagctactcaagaggctgaggcaggagaatcgcttgaacctgggagacagaggttgcagtgagccaagatcatgccattgcactccagcctgggcgacaagagcaaaactccatctcaaaacaaaaaaaaaaacaaaaaaaacaaaaacagaaaagaaaagaaaatgaagcacagagaggtatagtcactttcactctttcaccaacacagagctggggagtggcagagctgggattttaactcggggacccggctctgagcctgtgatctgaattcctgccattgcacccatcagcttcagtctaatgtccaactcagggactgcctctcacggtgagccctccctgaaccttctggcccccacgtccccactcctgatctgccccagattcatctctggctattgggtggggcagaaaaagagtcccctctccaccagggtggggtaagggcagaaagcccccaacagccaggcccagagcacccagttggaagtcccctgccagcccggcctggcttggggagggtcttaccgcttcatgtgctcgctggccactccttggatgtaaacagacattcccacgttgagcccgcccgggatgggctggtagtaaggcagcgtctggagaagaggcctggtgaggggactcacaagccatctgcctgttgcagcctttacccctcccagaaaagccccccagtcccttaagcaggagagaggaaaccatgggggaggaccaggttgaagatgacgagggccaacagttagacgtggacacagacagcctgaggtcagggtaggagtaaatcgagggtcggggtcagctttgggtaaatcagaccacagagtcagatggggccccccaggatcagagtggggaaaattggtgtgagggcttatggacggagctgcgggcggagtggggcctgagctggcatctcaccgggttgtaggtgggctggtagcccggtgcggggacataggccatcgctcgaggctgcgctagtggctggtcctgtgagaagagctgcaggagtgggagatggtggcggatggcaggcggtggtggctcttatacccagggtaagggagtggctggcaggggagggtccacagggctcctcttctgggactctcaggctgtcggcttctcctagagcgcaccctagtctcccttcccttgccagcttccctggtgaccagccaggacccaaatcacctgggtcccctcccctacgccctcctgcaaagaggaagtgctcatgaacttcggccctgccagggccttatcagagcccataaaaccctgcccagacttctgttggcagagggagggtgagaccaggcagggcagggcaggctgcaggaatgacccaggacaggtgggcagcggaggaggagaacgcggaggaactgcaaattcctgcctctcccagcaactgtgaagggacctacgttgattgcgtgcccaccacacatctttaccacgtatgttgtattgtagggagagtggtttagattactagtgtgtggagccagaggttctaggttcaaatcctgcctttgccacttctcagctgtatgatcatgggtcagtgccttaccctcaatttgcccatgtgctcatctgtaaaatggggatatagtagtatcggctgggtgcagtggctcatgcctgtaatcccagcactttgactggccgaggtggatggatcacctgagggcaggagttcgagaccagcctggcaaaatcccagtctctactaaaaatacaaaaattagccaggcatggtggtgggtgcctataatcccatctacttggaggctgaggcaggagaatcacttgaacctgagtggaggagagtgcagtgagccaaggtcacgccactgcactccagcttggatgacagatggagactctgtttcaaaaaaaaaaaaaaaaaaaaaggaattcataagagaggaaacaagtattgaatagctatcaaaatattttaaaaatgaatttgtgatccagtaatgcctgtatgttattaatctgccaaataagttctagctgtgggtccaactgccactcagaaaaataaataaataaagaaaagagtagtatcaaccttaggctgggtgtggtggcttgtgcctacaatcccagcaatttgggaagctgaagcaggaggactgcttgagcccaggagttcaagaccagcctgggcaacatagtgagacccccatctctacaaaaataaaataaaaattagctgggcatggtagcacacatctgtattcctagctactcagaggctgaggcaggaggatcgcttgaacccaggagttaaggttacagtgagctatgatcatgccactgcactccagcctgggtgacagactaagagtccgtctctaaaaatagcaacaataatagtcataataataataatcataatagtatcaacttcatagagtccttgatcattaagataataaatgctcagaacaggacatagcatatagaagtcattaacttaatgcttggtctcttgcagtcattccaaacataaatccggaagattgggatgatatatggataaaaaatcccaaagttttgtttgctcatttttgagacagagtcttgctctatcacccaggctgcagtgcagtggcaccatctcagctcactgcaacctccacctcccaggttcaagggattctcctgcctcagccttctgaatagctgggattacaggcttactccacgcctggctaatttttgtatttttagtagagaccaggttttgccatgttggccaggctggtctcaaactcctgacctcaagtgatccacctgcctcaacctcccaaagtgctggaattacaggcatgagccactgcacccggccagaaaccccaaagtccttttttgttttgttttttctttttttgagacagagtctcactctgtcacccaggctggactgcagcagcatgatctcagctcactgcaaactcacctcctgggttcaaggattctcctgcctcagcctcccgagtagctgggactagaggcacctgccaccacacctagctaatttttgtatttttagtagagactgggtttcaacatgttgactaggctggttgcaaactcctgagctcaggcaatccacctgcgtcagcctccaaaagtgctgggattacaggtgtgagacgccagcatcagatcccatgtgctgtgcagtgagaggtgccaggcagggcacgaacgccaccctcaaccccagggcaggcagggagaccaggaagccttgcaacccagagggaccccagcgacttttgctcactccctccgccccggaattccttgtgcccctcgcctgcccgctgccagtctgaatggccatcacctccatgccacccattcccatgcatccaacctctagccccagccttcaggactgcagtctctggagcccctaggtgcatcccagcccctcccacctctcctctatccaagaagggcaccaggttctttactttgctttattgtttgtggggtgaagataaggccttgggcttgagaaactcattgtcataaagttataaactgggaaactgggtcagaaggcatagaaacaactgtcatcgcccatcctccctttctgtggatgaggcgggacaaggccggccccctggctggggcctgggacgcgagggctctcagagcttggagaaggtgacggttttcagttccttgttctcagtcgtggcctggaccgacttcacgaggtcttgggtctgcagcatgctcatgttccaggacgcctggtaccgagggtgttgagagagaacgaggagagagattagcaggggccaatcaggataaagcatgagagcaccctgcaccctggttggtcgcctggggttagaggagggctgtgattggtcggagcgtgcaccttaccacgtagttgaggctctcggccaccgaatggtcgcgggaatacagcaggttgaccttggtgctctgcaccgccacggggctcttgctggaaatctcggccgccagcgctaaggcagcatccagcatgacctctttgtctgggaacacccggctgcagtgaaagagatcagggaccgggtgggctgggaagggctctctcctccagcctcccgcagatgaagaagtggccactcacagaggaaggcccaagaccccagagaaacagcccaatcagagcagggggctgaccccacaataaagaaatgagctcaccaagaaaggatgccactaggaattctagagcgaggagacaaggggacccggagaggcctccaaccctccaggcctggctgcccccagcactgagctaccacggccatggccctacctgaccagcccactgcccagggcctcgtcagccatcatcttgcgggcggtgaaggccagctcgttgaccaggctgcaaaggcaagcgtgcatcaggaggcggctgccaccccggggctgggagatgctctggggtctcctgcccacacccccacaccccctgcacccacctctggttcccgatgaccttgggcaggcgctgcagtgttcctacatcggcagccaaacccacgtccacctcctgggggaggaatcgggtcagtgtttggtttctgcccaatactgtgcccctcgcaatgtcaacgtccatgaaatttcatgtctactggagagtcccgccccaccttcaccccagtgacttcctccaaagtcccattccattgcccaggcagcttcttgactcaggcaagttccttcaacctagaatagagcccaccttcccactcatgcaccctcccattccctcagggcagctccatctgtgagagaggaaccctcctcaccctacctgagacccctttactgcatcccccggctccatcctgcctcccaccctcaccagtatggccccaggagcaatctctgcctctgacacctgccagcctcaaccccacctcataccttacccactcacaacttcacctcttgacttcctctatgggcaagtcttactttgtcgggttcaactccgactcttccatgaagccctcgaggctcactccaggccccccaacctcaccccactgcccagctctaagcaggagctcgggaggatgactcaccttcacctggaagaaagcatcctgggcacagtaccggatgtcacaggcggtgacaaggtccacacctaggaggtagaggccagggatgctgaatgaccaccagaaccaaccctggctcccgggaggtggggctgcctcttgggacacagtctggcccatgacagagctgaggctggatgccagtggccgcggcatcggagcagcagccccacctggggagcacccgagcaggaggatagccgcagactcacctccgccaatgcagcccccatggacggcagcaatcacgggcttggggcactgagagggaacaggaagagtggggtcagggctggcccaggggaggcgcgtatggagaaagatcccctccagacccctagagtcaccctctcgatgacgttgaaggtctcctggtatcgagtgatgatgtcacggaggtaccagctgatccgggccacatcatctcctttgggctgcaggatgtccgaagccatgtccatcaggtcaatacctggtgagaaggcatgatggagctcatccaggctcccaggccccacccattgactcaaccagggatcagaacccaggcacagcaggttcgaacccccaaaccaccaaggcggaaaaaaaacaactcacacaggacttggtgagggattgattgcatgttgggtgggaaggaaataaaagctaatatttgtggagtcattactcacagaatcctcacagcaaccgtaccagctaggtcctattactatttgtgttaccaatgggtaaactaaggcacagagaggttaagcacttgcccaagggggtcacactggctggtgagtagtgagtaatgaactatttaaattaactcattaatgtttttagagacagggtctcactctgttataccagctagagtgcagtggcacgatcatggctcactgcagcctcgaactcccaggttcaagcaatcctcccacctcagcctcctgagtggctgggactgtgccgaggctgctcttgaactcctgggctcaagcgatcctcccaccttggcatcccaaagcactgggattacacgtgtgagccaccatgccgcatcagaagtaggattttaaaatctggaaccatgcagctggctccagaggccatgcttttccccaagatgccagacagcctgggactcaaggtctgcagcgtgagcaatgcagtcaatggtggtgatgtttcctgagatgagaaacatctcacgatgcagcaatttctgtggctccaacttcaagatgatcctgaatctgacctttcctgcatcagttgttctccatgagcccaccctgctctccctgtttccacctgtgtccccagtctattccctacaggcagccaggggaagccagtggacaccttcttgggtcagatcctctttttttttattttattttttttatttcagacagagtctcgctcttgtcgcccaggctggagtgcagtggcaggatctcggctcaatgcaacctccgcctcccggttcaagtgattctcctacctcagcctcccaagtagctgggattacaggcgcccaccaccatgcccggctaatttttgtatttttagtagagacggggttttgccatgttggccaggctagtctcaaactcctgaccttgtgatccacccacctcggcctcccaaagtgctgggattacaggcgtgagccaccgtgcccggcccagaccctctttttcccacctgtggctcttagaacaaaatggaacgtccttgtcatgactaccctgcatgaacactgttcccaacctgttactttgggcacactggcctccaactctgtgtgtgtgtgtgtgtgtgtgtgtgtgtgtgcactgttcccaacctgttactttgggcacactggtctccaactctgtgtgtgtgtgtgtgtgtgtgtgtgtgtgtgcgggcacgtgcatttgagcccaggagttggaggctgcggtcagctatgatcgcaccactgcactccagcctgggcgacagagcaagaccctggctcaaaaataaaaaataaaaagaaaagaaaatggcaggacagagaggtgaaaagacaagtggaaataggatccagatcactgcctgagggctgtgcagtggtacagaatcttctcattgagaaggtgaccttgagtaaagacccagaggagagggagggagccaaggacctttgggctgacaaccatccctccctcttcaacagccacagactgactccttcacttccttcagctatagctcaaaggtcacctcctagagaggccctccctggccaacctggctcaacgatggccccatcccccgcatcctgaccccgccttacctccgggctgcacagctgctatcctataattaggtccttatctgcttgagggtctgactccctttctagaatgtgagctctgagaacacaggagtttttgtctttctgtccactgctgcatcccctgggcctagcacagggcctggcgcacacgagctgctcaataaatgatcaatacagacaacagtccctgtcctcatggggaggcaaacaaatgaataaaaaagtatattttggggctgggcgtagtggctcacacctgcaatcccagcactttggaaggcagaggcaggaggatggcttgaggctaagattttgagaacagcctgggcaacattgcaagacctcttctctacaaacaatgaaaaaattagctgcacatgaggctgggcatggtcacctgtaatcccagcactttcggaggctgaggtgggcggatcgtttgagcccaggagttgcaggctgcggtcagctatgatcgcgccactgcactccagcctgggcgacagagcaagaccctggctcaaaaataaaaaataaaaagaaaagaaaatggcaggacagagaggtgaaaagacaagtggaaataggatccagatcacagcctgaggccaaagtcccccttactttttttttttttttttttttttttgagatgtagtctcactctatcgcccaggctggcgtgtagtggcgcgatctcggctcactgcaagctccgcctcctgggttcacgccattctcctgcctcagcctccctagtagctgggactacaggcgcctgccaccatgcccggctaattttttacatttttagtagagacggggtttcactgtgttagccaggatagtctccatttcctgacctcgtgatccgcctgcctcagcctcccaaagtgctgggattacaggtgtgagccacggcgcccggcaatcccccttacttttaaccagcatgccagctactcagatgacagacatttagcagctaagagcaaggactctatagccaggcagcatgagttccaaaatcccagctctgccacttacaagctgtgattattgggtaagtttcttgctctctggatctgtttcacctttaaatggggcttatagcagaacctgtcttgtggactgtgattagaattaatatgtttaacgtgcttagaaaggggcgtcacacaccatgagtgctacataattgtggccacctttttctttctctaattagtagttctactctatcactgggtcactgcatgacctgccgtttcttccttctggccttcggggtcttgctgctgaaaataagataagacggccacattcagctgggagctgaaagatgaaggacctgggcccggcacagccacaaaaaagccccatttttctgttctcagacatgatctctatgagagcaaggggtcaggaatcggggctgcttcccgtttccacatctgcagcacccaggagggggctctggcactggactgtgtcactgaatgtttgtcaaatgaatgaacaaatgaacaagaggaggaacagagggagatgcagaaagaaagcaggaggctgggtgcggtggctcatgcctgtgatcccagcactttgggaggctgaggcaggaggatcgctttagatcaggggttcgagaccagcctgggcaacatagcaagccctgcctctacaaaaagtgaaaaaacttgctgtgcatggtggtgcacacctgtggtcccagctacttgaggggctgaagtgggaggatgaggggaggtggtaggggctgaggtgggaggggttgagctcaggaggtggaggctgcagtgagctgagattgctccactgcattccagcctgggtgacagagggagaccctgtctcaaaaatgaaagaaagagagagagaaggaagtgagaggtgacagcatgctggcagcccttgctcgctggcctcagagcccactctggccatgcttgaggagcccttcagcctgctgctgcactatgggagcccctctctgggctggccaagatcggagccggctccctctgcttgcagggaggtgtggagggagaggcgcgggcgggaacccaggctgcacgcagtgctctccggccagcgcaagttccgggtgggtgtgagctcggcgaccccgcactcggagtggtgggccggcgccacctgccctgagcagtgaggggcttagcacctgggccagcagctgcggagggtacaccgggtcccccagcagtgccggcccgctggtgctgcactcgaatacttgccgggcctcagctgcctccctgtggggcagggcttgggacctgcagcctgccatgcccgagcctccccccgccgccgtgggctcctgcacagcccgagcctccccgaggagcgccaccccctgctcggcggcgcctggtcccatcaactgcccaagggctgaggagtgctccgcctgcggccctggtgcaggatccactgggtgaagccagctgagctcctgagtctagtggggatttggagaacatttatgtctagctgagggactgtaaatgcaccaatcagcactctgtatctagctaatctggtggggacttggagaacgtttatgtctagctaagggattgtaaatacaccaatcagcactctgtttctagctcaaggtttgtaaatgcaccaatcagcaccctgtgtctagctcaaggtttgtaaatgcaccaatcaatgctctgtgtctagctcatctggtggggacttggagaaactttatgtctagctaagggattgtaaacaaccaatcagcactctgtgtctagctcaaggtttgtaaatgcaccaatcagcaccctgtgtctagctcaaggtttgtaaatgcaccaatcagcactctgtatctagctaatctggtggggacttggagactctttatgtctagctaagggattgtaaacaaccaatcagcactctgtgtctagctcaaggtttgtaaatgcaccaatcagcaccctatgtctagctcaaggtttgtaaatgcaccaatcagcactctgtatctagctaatctggtggggacttggagaatctttatgtctagctaagggattgtaaatacaccaatcagcactgtgtgtctagctcaaggtttgtaaatacaccaatcagcaccctgtgtctagctcaaggtttgtaaatgcaccaatcagtgctctgtgtctagctaatctagtggggacttggagaagttttgtgtctagctcagggattgtaaacgcaccagtcagcaccctgtcaaaatggaccaatcagctctctgtaaaacagaccaatcagctctctgtaaaacggaccaaccagcaggatgtgggtggggacagataagggaataaaagcaggctgtccgagccagcagtggcaacccactcacgtccccttccatgctatggaagctctgttcttttgctctttgcaataaatcttgctgctgctcactctttgggtccacactgcctttatgagccataacactcaccgcgaaggtctgcaacttctctccagaggccagcaagaccacgaacccactgggaggaatgaacaactccggacgggaggaacgaaccactctggacgcaccgccttaagagctataacactcactgcgaaggtctgcagcttcattcctgaagccagcgagaccacgaacccaccagaaggaagaaactctgaacacacccaaacatcagaaggaacaaactccgaacacatcagaaggaacaaactgcggacatgccgcctttaagaactgtaacactcaccacgagattctgcggcttcattcttgaagtcagtgagaccaagaacccaccaattccggatacattttggtgacccagatgggactattacctatcgccaagcggtgagaccactgcctatcgctgagcggtgagactatcacctatcgccaagcagtgagtaccactggacccctttcacttgctattctgtcctatttttccttagaatttgggggctaaataccaggcacctgtctgccagttaaaagtgactagcatggccgctggactaaagacatgggtgtcaggctttctgggaaagggctctctaacaactcccgactctttggagttgggagcgttggtttgcctagaaccagcttctgcttttcctgtacttctgggctgagccgagggtcgacagagaggaaagccatgcagctctagggtcccgacaagacaacaagttcgttgaccctgcagccatgagcggaacactcaaaggcatgtcgcccaagcgagactcgcccatctatcctatctatcctgactcttgcccccgggtcctaatgcctgccagacaaacttcctctcacctctcttctccgagtttagtcctgcttctaaaatttgctgtctctggtgcttttctagtttctcctataagaacgacttctagaactctgttacattctttaggcacccaggctcaccaatcagaaagacataatttttgcccaaagccctgtcatagtggcgactacctggaattttacgatccctcctcagactaacaggcctaacaaaggtattcctgaagctaggatatggggagcctcagaaattgtagctttcctattcatataagtgaggacaaaaggtgtcactcttccaaccctggagatcccttccctccctcagggtatggccctccacttcatttttggggcataacatctttataggacaggggtaaagtcccaatactaacaggagaatgcttagaactctaacaggttttcaagaatgcgtcggtaagggccactaaatccgaccttccttggtcctccatgtggtctgagaggaaaactagtgtttctgctgctgcgttgatgagcacaactattccgatcagcagggtacagggactgttgcagtttcttgggcagggggagaaacaaaacaaaccaaaaccgcgggtggttttgtctttcagatgggaaacattcagccatcaacaggctcacccttgaaatgcatcctaagccgttgggaccaatttgacccataaaccctgaaaaagaggaggctcattttttttctgcactatggcctggccccagtattctctctctgatggggaaaaatggccacctgagggaagtacaaattacaatactatcctgcagcttgaccttttctgtaagagggaaggcaaatggagtgaaataccttatgtccaagctttcttttcatggagggagaatacacaactatgcaaagcttacaatttacatcccacaggaggacctctcagcttaccaccatatcctagcctccctatagctcccattcctattaatgataatcttcctctaatctcccctgcccagaaggaaatatgcaaagaaatctccaaaggaccacaaaaccctcctggctattggttatgtccccttcaagctgtagggggaggggaatttggtcccacccgggtacatgtccccttctccatctctgatttaaagcagatcaaggcagacctggggaagttttcagatgatcctgataggtacatacatgccctacagggtctagggcaaactttcgacctcgcttggagagatgtcatgctactgttagatcaaaccctggcctttaatgaaaagaatgcagctttagctgcagcctgagagtttggagatacctggaatcttaatcaagtaaatgatagaatgacacctgaagaaagggacaaattccctatcggtcagcaagccatccccagtatggatccccactgggaccttgacttagatcatggggactggagtcgtaaacatctgttgacctgtgttctagaaggactaaggagaattagaaaaagcccatgaattattcaatgatgtccaccataactcagggaaaggaagaaaatccttctgccttcctcgagcagctataggaggccttaagaaaatatactccccggtcacccgaatcactcaagggtcaattgattctaaaagataagtttattatccaatcagccgcagatatcaggagaaagctccaaaagcaagccctgggccctgaacaaaatttggaggcattatcaaaacctggcaacctcagtgttctataatagggaccaagaggaacaggcccaaaaggaaaagtgagattggagaaaggccgcagccttagttatggccctcagactaacaaaccttagtggttcagagaggacagatagtagaggccaatcacccggtagggcttgttatcatgcggtttactaggacactttaaaaaagattgtccaatgagaaacaagctgccccctcgtccatgtccactatgccgaggcaatcactggaaggtgcactgccccagcggacgaaggttccctaggtcagaagcccccaaccagatgatccaacaacaggacagagggtgcccggggcaagcgccagctcatgtcatcaccctcactgagccccgggtacgtttaaccattgagggccaggaaactgacttcctcctggacactggcgcggccttctcagtgttaatctcctgtcctggacgactgtcctcaaggtctgttaccatccgatgaatcctgggacagcctgtaaccaggtatttctcccacctctcagttgtaattgggagactttgctcttttcacatgcctttcttattatgcctgaaagttccacacccttattaggcagggacatattagccaaggctggagctattatctacatcaatatggggaacaagttacccatttgttgtccccctacttgtggagggaatcaaccctgaagtctgggcattggaaggacaatttggaagggcaaaaaatgcccgcccattacaaatcaggttaaaagatcccactgcttttccttatcaaaggcaatatcccttaaagcctgaagctcataaacgattacagaatattgttaaacatttaaaagctccaggcttagtaaggaaatgcagcagtccctacaacaccccaattctaggagtacaaaaactaaatggtcagtggagactagtgcaagatcttagactcatcaatgaggcagtaatttctctatatccagctgtaaccaacacctataccctgctctctcaaataacagaggcagcagaatggttcacagttctagacctcaaggatgccttcttctgtattcccctacactctgactcccagtttctctttgcctttgaggatcccacagaccacacgtcccaaattatgtggacggtcttgccccaagggtttagggataggcctcatctgtttggtcaggcactggcccaagatctaggccacttctcaagtccaggcactctggtccttcaatatatggatgatttacttttggctcccagttcagaagcctcgagccagcaggctactctagatctcttgaactttctcgctaatcaagggtacaaggtgtctaggtcaaaggcccagctttgcctacagcaggtcaaatatctaggcctaatcttagccagagggaccagggccctcagcaaggatggagagggaggacagggaggagagggagaaggaggggaaggaggggaaggaggaagggaggagagggagggaggggaaggaggaagggaggagagggagggaggggagggagaaaggggagggaaagaaagaaagggacctgggaatatgttaatggacaaaacagaaagaaatagtttactgtctgtcttccccactgagttgggaacgccatgacaacagggcctgggactgtcctagtcaagactgggttcccagcaccaggctctgggccctgtgcagaaatcagtgtatgaaatattttgcttctggttcagtcctaaagggccaaccctcccacggacaactacatacgctggctggacaagaaacaaacaattatctgaaggcactgggcagattctggagggagtgaccacttaggagagtggcagaacactctctcggtgtttttgaaaatggttttgaaaactttcagcctgagggcagactgaaattgtgcttgaagagccacaggatagagtccaaggtgaccaaagctgccgggaagtgaggggggatattccaaagaggggagagccagagcgaggagtcccgaattctgtgtatcaactctgccctaatctcttgctgggagatgtatgtttttgttgttgtttttgttttgagatgggttcttgcactgtcacccaggctgggtgcagtggcacgaccacagctcactgcagttttgacctccctggttcgagccatcctcccacctcagcctccagagtagctgggagtgtggtcattcatcacacccagctaatttttgttagagacaaggtctcagtgtgttgccctggctgaagattagtttttaaatcttttgctgggggtgcatgtatggtctgtaaatcagcaagaagccaggcacagtggttcacgcttgtagtcccagcacattgggaggccgagtcaggaggatcgcttgagttcaagagttgaagaccagactgggcaacatagcaagacctcatctctacaaaaaaataaaaataaaaacagaaaaaccaaaaaaactaattccaactaagctaccaaaacacgaaactcaacactctttggaactatatgatagaatccagagtatccacatcttattcctatatcccaatatccaagaaacaatccaaactaactcaaaatacaaagaaacaggaaagtgaagccgttttcttttttttgagacagagtctcgctcttgtcaccaaggctggagtgcaatggcgtgatgtaggctcactgcaacctctgcctcctgggttcaagcgattctcctgcctcaggctctccagcagctgggattacaggcatgcaccaccacgccgggaaaatttttgtatttttagtacagacggggtttcaccatgttggccaggctagtcttgaactcctgacctcaagtgatccacccacctcagcttcccaaagtgctgggattacaggcatgagccactgagcccagcctgccatttccaagcgaaaagatgataaggagactgaccccaagatgacccagatgttgagattagaagataaggagtttttgttttgtttttattttgtttttagagggagtctcgctatgtcacccaggctggagtgcagtggcgccatctcggctcactgcaacctctgcctcccaggttcacgccattctcctgcctcagcctcccgagtagctgggactaaaggtgcccgccaccatgcctggctaatattctttttttttatttttagtagagatggggtttcaccatgttagccaggatggtctcgatctcctgacctcgtgatccgcctgcctcgacctcccaaagtgctgggattacaggcgtgagccaccacacctggccagaagacaaggattttaaatcagtcattataactatgctcaatggcaggaagaaaaacatgcatgacaaaaaatatacaactgaccaggcacagtggctcacgcctgtaatcccagcactttgggaggccgaggggggccgatcactggaggccaggagttcaagacccgcctggccaaaatggtgagaccccgtctctactaaaaatataaaaattagccaggcgtggtgccgggtgcctgtaatcacaagtactcaggaggctcaggcaggagaatggcttgaatctgggaggtggaggttgcagtgagcccagactgcaccactgtactccagcctggtcaacagagtgagactccttctccaaaaaaaaaaaaaaaaaaaaaaaaaattagctaggcctggtggcgggcatctgtaatcccagctatgcaggaggctgaggcaggagaattgcttcaacccaggaggcagatgttgcaatgagccaaaattgcatcactatactccagcctgggtgacaaagcgagactctgtctcaaaataaatgaataaataaaataaaataaaatatgaaccaaatggaaattggagaattgaaaactacaatatctgggctgggcgtggtagctcacgcctgtaatctcagcacttttggaggccgaggcgggcagatcacgaggtcaggagatcgagaccatcctggctaacacggtgaaaccccgtttctactaaaaacacaaaaacttagctgggtgtggtggcaggcactggtggtcccagtactcgggaggctgaggcagaagaatggcctgaacccgggaggcagagcttgcagcgagccgagatcgcaccactgcactccagcctgggtgacagagcgactctgtctcagaaaaaaaaaaaaaagaaagaaaactacaatatctgaaatttaaaatcagtgggtagtagctgggcacggtggctcacgcctatcatcctagcactttgggaggccctaggtgggtggatgacctgaggtcaggagtttaagaccagcctggccaacatggtaaaactccgtctctactagaaacacaaaaaattagccgggcgtggtggcgggcacttgtaaccccagctacttgggtggctgtggcaggagaatcacttgaacccaggaagcagaggttgcagtgagttgagattgcaccattgcaacaaaagcaaaactccgtctgaaacaaaataaaacaaaataaatcactggatgggctttacagaaggatagagatgactaaacagttagtaactgtgaccagtggaaattctccaatctgaagaaaaggtcagtgggtcaatccaaagatccaactgacctgtaactggaaatcaattagtgagttgaatagttgcacgaaagcatgttattatattatatgctgacacagctataggctgagaggttaagcatgttgttcatggccacagatccaggatggaaacctagacttcagagcctatgatcccatcgtgttctgtcagactaatacttatatttgaatgttttaaagtaggcctttttttaaaaaaatgatagggctggccatggtggcacctgcctgtaatcccagcattttggcaggctgaggtgggagaatcgcttgacctcaggtatttgaggttacagtgatttatgattaggcaactgtactccagcctgggtgacagagaaagatattgtctccaaaaaaaaaaaaaaaaacacacagataaaagtgtgagttaggggccaggagcaatggttcaggcctataatcccagcactttgggaggctgaggcaggcagatcataacgtcaggagatggagaccatcctggccaatatggtgaaaccccgtctctactaaaaatacaaaaattagctgggtgtggtggcccacgcctgtagtcccagacagaagaattgcttgaacccgggaggtggaggttgcagtgagctgagattgcgctactgcactccagcgtggcaacagagcaagaccccgtctcaaaaaaaaaaaaaaaaagtgtgtaagtcagaagctgcttaaaaccctaattcagaagcactgctccactgtctattgccaggagctaggaaggctggcagggtgtgtgaagagcgtctggtacctgcagtgaacatttttcctgcaccagagatcaccaccgcccgacagtcagcgtctctcgaaatcttgttgaagcactctaccatctctctgtgaagcaacgagtgaagggttacaaatggggcgggaataccctgccctcatgtccatcttcccacaacgttccactttcacccagtcccgcagccccgcctccccccgcaggcaggcctccaggatctgcaggtcagacctccagaagaccttgttcatggcattcctcttgttgggccggttgagctggacatgcagaacatgtttctgcgcagacgtcacacgaagggactcatagctgtggtctggggcttcaccgagggctactccggaagcctcctcttgtgcagaggagccagtgaggcgaaggctaatactgagtcccgggtagttggagcctgtcagtcctggggagaaaggaacagcctttgatgaccccagactgcaagacacaggcctatcgaattagggagtccttcaaaagggagcacacgcacccctgaatttaggggactcgggcccttcgtgaccccggatagccctccccgtcctacatctgctataacagcacgacagcgcgacgcacccccataaggcaagaggtgactcacgccgggtcagtaggtcgcggagtctgcgagaagccactatccccgccgccatcgccgccgccttcgtctactgcgttcggacggagtaacgtgcccgttagcggagggggcgggcacagaaggccgccatgttgagcgagggcaccgatgccgcaacctgacaggcaatgacgccgttctttccgccatctttactaagggcagtcgatttccggttgccttacatagagccaggctcagaaatggaccctttgccccagtgggaacctggccaaagaaaatagctcctgcaatggcgtgaacctgggaggcggagtttgcagtgagccgagatcgcgccattgctctccagcctggcgaccgagcgacactccgtcttaaaaaaaacaaaacaaacaaacaaaaaaaaaaacagaaaagcaaacagctcccgctaaagttcatcacacagctgtttcataatggtggaataataggcgacagctgaaatgtccaaggacataattgcagcagagcttgtaatcatgcatgtatatatcatgttaactaaaaataaaagaaaacttgcagtactgtgagtttactcaggtaaaggaatgagtacagacgggccaacattaagcgctgactgtataatatgaactcccaccaggaggtcgtactatttcctactatatgcagaggaaactggcccaggcacgggaagacactaggttcaaggtcggtgggcttcagaagggctaaagcaggattacctggcaccagagttcatgttcttagcctggcgcagtggctcacgcctgtaatacaagcactttgggaggccgaggcaggcggatcacctgaggtcaggagttcaacagcagcctggtcaacatggcgaaaccccgtctctactaaaaatacaaaaattagccgggtgcggtgtccggcacctgtaatcctagcgggaagagaatggcttgagcccaggaggcggaggttgcaatgagcagagatggcaccactgtaccccagcctgggcgacagagcaagatctcaaaaaaaaaaaaaagaagaaaaaaaagttcatgttcttaaaaaaaacaaacaaaacaaaaaaaccgaaattcccttgggaaaagccagctaccaaaaggcataaaaagtactgtaaaactgctggccgggcgcggtggctcacgcctgtaatcccagcactttgggaggccgtggcgggcagatcacgaggtcaggagatcgacctcctgacctagctaacacagtgaaaccccgtccctactaaaaaaatacaaaaacttagcgggcatggtggcgggcgtctgtagccccagctactggggaggctgaggctggagaatggcgtgaaccccggaggcggagctcgcagggagccgagatggcgccactgcactccagcctggggacagagcgaaactccatctcaaaaaaataaaaaaaaaaagtactgtaaaactgcttaagtatgctttttggggagacattgagcaaggcggtgaacagatgtctctgggccagtgagattgaaggaagtatctttccttaatgaacctgtctcctgtgtgttttcacagactagaaaagcaggctcttttgaaagacagaaccattaactacccatcaacagtagactgtttataccatagaaaactctgaaacctctatgcaaaaataaaaatgtgtgagaaaaaaatgtgaagatgtaatagaacatttagtatgatcctttgttcctttggtgtaagaaagtatagctgggctgggtgcggtggctcaggtctgtaatcccagcactttaggaggcccaggcaggcagatcacctcaggtcaggagtttgagaccagcatggccaacatggtgaaacccaatctctattaaaaatataaaaattagccaggcgtgttggctcatgcctctaatcccagcactttgggaggccaaggcgggtggatcacaaggtgagaagatcgagaccatcctggctaacacggtgaaaccccatctctactaaaaataccaaaaattagccgggcgtggtggcgggcgcctgtagtcccagctattcgggaggctgaggcaggagaatggcgtgaacccaggaggcggagcttgcactgatgtgagatcacgccactgcactccagcctgggccacagagcaagactctgtctaaaaaaaaaaaaaaattagcggggcgtggtggcaggtgcctgtaatcccagctacttgggaggctgaggcaggagaattgcttcaacccaggaggcagagtttgcagtgagctgacctcatgccactgcactccagcacttcagcctgggtgacagagtgagacaatgtctcaaaaaaaagagtgtagctggacctgcacagaatatggtgtatgtatgtaatatctctggaaggagactcaaactggtaacaggaaatgaaattggatgctaggagacaaactggtaaaattcactttttatcaccttgactggcttaaaaacaataaaccctagttgattttatttatggctgcaagatgactgtagtttttccttgtctaaagattgtttgaaacttcccatagtgaagcaaaacttgttcatctgccaaatgatgcttttgtgatgtcattaaatgttaaaaatgtaaggccgggcgcagtggctcatgcctgtatcatagctactttgggaggccgaggccagtggatctcaggagttcgagaccagcctagccaatatggtgaaaccccatctctactaaaaatacaaaaatcagccaggcatggtggcacatgcctgtaatcccagctacttgggaggctgaggcaggagaattgcttgaaccaggaggcagaggttgcagtgagccaagattatgccattgcactccagcctgggtgacagagcaagactccatctcaaaaaagaaaattttattcacagtaaattccccagagtgggctattctcaagcacacatgcataaacttcaaggtttgtgacctgctcctctgcaggtcacctcttccctccagtaggagtcaaaatccttaaaccaggatccttccgggtggtacccgccaccgcaaggcatcttcacagatttgcatctgcaagtgggaagctatctaccgtatgatgcaattatatagatcctttaagttttgagacatggtctcgccctttcgcccaggatggagtatagtggtgccatcacagctcacagctcaagtgatcctcctgcttcagcccccatgagtagctgggactataggcacagtgtgtgccaccatgcccacatcatttttctatatatttttttctcgagacggagtttcactctcgtcactcaggctggagtgcaatggcacaatctcggctcactgcaacctctgcctcctgggttccagcgattctcctgcctcagcctcctgagtagctgtgactacaggaacgtgccaccatgcccggctaatttttatttttttagtagagacagggtttcaccatgttggccaggctggtctcgaactcctgaccgtaagtgttccgctcacctcggcctcccaaagtgctgggattacaggcgtgagccaccatgcccggcccactttcttattttttgtagacagggttttgccatgttgcccaggtctcaaaactcccggccttaagtgatctgcctgccttggcttcccaaagtgctgggattacaggcatgggccactacatccagctatatatatcctttaacccagcaattccactggcaggaatttatctcctgatcagtatcagggaagctggccaagatacttgtgtagatacgtgttacagcgctgtttgcaatagcaaaaatagacctggaaactaccctttgggaccaggttaaatcatgacacatccacacaatgatactgcaagggtaaagacaagtcactctgaaatgatacagaacacaaaggttttgggtttttttgacaccctgttgcccaggctggggtgcaatgaccccatcacagttcactgcagcatcaccctccagggttggggtgatccacctcagcctgctaggtagctgggactactggcatgcgccactatgcccggctgatttttgtatttttagtagagacagggtttcaccatgatggcaaggctggaaacctttttttttttgagatagggtctcattgtcacccaggttggagtgcagtgatgtgatcactgcactgttaacctcctaggctcaactgacccacctgcctcagcctcccgagtagctgggactacaggtgttccaccaaacccacctttttgtagtgacgtttcaccatgctgcccaggctggtcttcaactcctgagctcaaagtatgtgccccaccttggcctccccagattgctggaattataggtgtgatgacccactgggcctgatagagcttgctcgggcagggcccagtaagaatgccactaagcctgatggattttcctcaaagactcaattgctagcaccattctcagtctgcagcccaccctgctcctcttgggtctctgtatgcctccagagggcctgtgactgtgctcaggcctgcctgtgtcttcaggacagagagggagaaaagcagacatcctggaatcccagcaagtgctgtgtttattttccaaacaattttattgaaatgtgccaagagtacatgggcagcacaaatgtatgaacaggaaaaaaaaaaatcacatgtacaataattttttaaaagtgaaggttaatcttgggagataacagttcccctctccctccccctgcagatttccagcgtttccattaaggttaagtaagcctctacaaacctagcatttaaaaaaaaaaaaaaaaaaaaaaaaaaggaatacaagatcttttgcaaataacaaaaacaaaaaatggcataaaggaaagagaaatgtcttcctgctcagatgggactcttcctaggcacctaattaggaggcgtgctgagcagtggagaaacacaacttcagagtgtaagggtatggaccatctgcaaaggagagacaagtttggttggttcccgtctttggaggctccccaaacccaggtcccctcaagtttgtacccatctcccattttctgcaggtcaacggcaggggtctaaggagtgactgcccaacgtgaggcttcaagatgagccaattaccaattatgcacggcgtttctccttctcttccttcattcccatagagaatcccattcctatctccttcgccagcccaaggcaatgggcctctcccagcaactgggtgggcaagttttacctgctggatagtgttgcctctttcctaggtaacagagtggctttcctacctaagccagtctctgatgcaaagaagagaatgccacctccctggaggacaagcctgagcaactcccaagctggcagagtgagtggcagcaggcagtcaggctggctctcccaagaggagcacaggctgctctcctgatgagcaggtcccacctgcctgtgtcaccaacagtgcgaagatcccggggtcctatctcaagggcaggaaggacatccctggcctgaagccagccaacccattaggtcaccaggttgatgcctgcaggacacacagatactcacttgggtttttcatctggtaatggttcaggaagcccagagtctccagggcatcgctcttggattcccactccagcagtccagaggagctgcgctcacctgattgcaaaccaaggggaaaagtaaaggttttagactcacccaataggaactaggcagctgcccaccaaccaccatgcaattagggcaaggaggtgggcacactcgactcacttttgcctgagaatactttcacagaagatggccgcttcactcccagctcatcgcagatctgcaaaagaaaacaggtagtaaatgaactctgaaacaaaagggccgccacacaggattcaagcagaccaggccctgcatgactcagtacttgaagttttcaggagaaaaggcttgtagattttatcacataccctaaggcatccctgtgtcataaaaaggccagcaacaatgctctttaattattaagttgcctgagactgggaagctgctttttcgttcccaacttcaacagctatgtggatatctgcacccggctgtttgctgaacactgtttgctgaatgcaaggtcaacatttcagaccacagccagatccacttgagttcctcctcccttccgctgcctcagttccccctgactgagctttacagggccccaccttctgatggtatcagggtgatggcacccgaagcctacgccaatgcggttcttgtgaaattgggccctcatcactgggcctgtgaagcagctttcccagcaaacgagcagttgccctgcttgccaaaaatgtaaaaggaaggaacgcggcaaatggtgttgctagaaacttggtgccattctcaccctgtccagtttgagagcacagattcctatctgtcctggcctctgctgtgtccctagcactcaacccagggccaggcaggacaggagttcaacagctatttgcagaaaagactgaaatgaatggcctactcagacggccgtggcaaggacccgactgcctgcgcagctccacggcacacacctcaaagaagttctcctcggtcacctccagcggggcgttgaagaagtgcagcacgttgctggggtgctggatgcggttcttggctgcctgctctggggtggagaaccgattgttccgggattcactgaagtctttgtaactgcaagacccgtcttccaacccgtatgactgaccaggcatgatggctggctgcttggagacactgcagcaaggaagaaaggggagcctttgtcatacccaaagttgtccctgaagctttcccctgtggcctccagaggcttagcttgccctgtgtgccttggggcattgctctacacctgaggcaaggctgactcactttctcctgtggtgtcagagacacgtctgggaacacacctgccacatcccatttctgtgtgagtcaacacctcggcctcactgtgctcctctgctgggccccattcccctccttttctctcccctgtacctctgctgccctcccgagcctgagcacctaccagacattcagcttctgcccaaacatgaagttgttgttgaggtgggtaatggcccggtctacagcgtagccatcagccatctccaccatggcggcccccggcttgcttttcatgaatttcaccttggggagagtagctgcagtcagcacctctgtccagctgccagggtcccctctcctgcccctcccaagttagtgataataacccctgctctggcctcccatgtcctcacagttaatcgggaccactagaaaaacatgcctggcccacaccaagtgctcaacccatagtgagaagcagagcctgggccatgtttttaactgtgggacataacccaccagtaaatcatttagtgaagcatgacagaaaactgtacaggaatcagaaatcaaatcagccattttcaccattttgtctgttacacacagacgtgtgtgatctatggatggctgtgtctacagtcacaaggtaaaatactccttcagctgggttacaacagagcagtgccggctctggagccaggcagtctggctctgagtcctgcttcacataaaggctatgtgaacctgggcgcgttatttaagccccgtcctccacttcccctgtccatctcattaaggattaatgtgagaaattacacaggtcactacatgtaaagcatctttaacagtgcctggtaactaacaacacttcacctgtgttacgaactactctaagtaatgggccaagtcatgagctgcacaaaggcccccaagacccagacgggtttaatgttaagcaaaatgccgcctggtctcaggtagacactcagccaccgctagccccagtcaactgtcccatgggaaggcagaaggcccggtgttgccaggtcttaagttttcaggaggaaatccttaaacgatggtgtttcactataatggattcatttttatgttttataaatctctatgttcatgtactggtattagtacttttatgtgataaaatcttttttttaaacattggtaattcaaaaacacaacacccacatacagtgaggaccaaacaaaacccgtctgcaagcaggctgcctgagctcactgagtcactcattggcgtctgcccgcccagcgccacaccaggctcccccctggttctttcccgtgctgactggcaagatacgaggctcagcgaggaacccagggggcccggcagcagctcaccttctccacattgccatataagcagaagacattgaagactcggtcacagttcatcttagattgatccaagccatagaccatgagcacagggctgtcggcgtgagggccatactcgggtggtgggggagggggtggggggtgcccatactgggggccgtagcgacttgggccccgacggtgaccccccactggtggacccatccttctcccttcgtagtgaggtggggggggcccgtagccctcatcatggtaatggctgtggtacccaccgtggggccctcctggggggtgggaaggaaagagagggaggacgggtgagaatttgcacggcgggcggcgggcaggggcacatgagccacgggagtccacggaggggaaccccctgccctcaccatattctgcggggtgatctcccaggagagggggctgcctctggcgtttgttggggttgctgccagggtcacctgtggagagagaaaacagttaggagtctcactcagaaattggggtctctccctccctcctgactgcacaggctgatctgagcccccagctcctgccaactgcaagccctcccttcctcgagggctgtggggcctccttttgtgatctgacctacggcgggcatgaagcccgagcctcaaagctggtgcccactctccttcccctgctcataccaaagggctggccttgttctgtgaaggacaaggccagattctgtgctctcacctaccctggccctgggagaaagcccagctcccaggccctctggggaatgtgcagctgctacagaagctgatatattatggcgggccaaaagcagctttctaaagtgactcccaatgaagggagagtagattaagaggaaaataaccccagagggaagcaagcaagtttgacccccaaagcccccaaagttctaggagctccagactgtctctgttagatcccttctttcttaatcccagtcccccctccctcccagtcccgccagcccaagagggactgactgtagctgacaagcagggcaacagcagaatcagttcaaataagcaatcatgtacaaggcatcgacattcccacacccagcaatggcgcagatccaccccgaccccagcagttcgtaatcactgcctttaacttagcgcttaagtggcaggcactgggctaagcgctttacagacatcacagcttctgaaattcctcacaacaaccctatgaggtaggttctgatatttcagccccattttacagataagaagactgagttgttaacttttaactgagcagttaaaagacactttggcccaaagtcacaaagcaagacagtggctgagccatatttgaacccaggtctggctgactccaaaacccagggctcgaaaccactgccctttcctgccacccggcctgggttttgttaccagtcattacaaaatggaaaaggactacttacagcagaagtacagagtacaatgtccatttgtcacaaaaaacaaatctgtattttctcttaccattggacgcttcaacagtgagttagcacagttctgaaagatggcgtcccatcaaacatacactgcgaccctgcatcacatggttttacagtcataaatacaagtcacggtacacatccgctacaatttttttaaagaattgttttaaaagtcaatattttgattaaatcaaaaatggctcacagatgttctgtcctcagaagatatcagaaaagtggaaataaaggtgtatgaagtgggtagtgtccctccatgttgtcacctcctcacatatgtgctgcagtgcggtggtgcggtgcttctggctgtgtagcgctccgtgtgcgtgtctcctggtatgaggtgtgccagtggccccactacgctcgcgcttttggccttgggagcgcgcctggttacccggcagcaggtaactgtgtgcctctgagctgtttggctgtctggttttaggtctgttttggtttttttgattttttttttgttgtggttaaaatttttttttttttttttggtttctgatctccagttggtgcagattatgttggcagccggtgactgcagaaaaaataaaaatatcaaaacagaaaaaaaacaaggccctccccaaaccaaatgacttaaaaaacaaaacccatatggcgaggaatggagagaggatcctattgtcttggaggcccatggaatctacttccgtctatgaaacgttctccgaaaagagcatcgctcgctggctggctgggacagctctgttctctgtgtttcctacttctgtgtacattctcgggttcaagtttgcttggattttgaccttttttttaatgtttaataaaaaaagcagtgtctgctgccatgttgcgtctctttctctctttgtctctgtatgcctctgtctctgtgcttgtagctgttccttggagcgcggtgtggtgttcttgatgtagtgagctcaagtctgcggctgtttctggggacgtggtggaggctgcatgttctgttctctccaggaagagctagtggttttctaccctgtgtgttggtgagcaatgtgcagaggcagagccgctgaagtatggttcctgaggggtggcgaagcaccgccctcactccaggtcacctcatcagccctcgtttttttttgggccccagccttggggctgccaaagctgagaggcatcaaaaccaatgcacagccagccccctgccactagcccctgccggtctgcacatcttctatttatgttccttggagaagaaatggttgttgccatgtttctgttagcagtcatgtaatgccattgcccgctctggtacattcacttggtcaccaatttgcctctgacctttggagggagcagccaggcccacagggcccactgtgaggatcctggggaagagtctagcccaccctgcccactgcttcccagatgcaagggcgagcaagacaggcctgcctaggaatggggggctctggcctctcagggcctgtgcgatgtcagcatcgagcctcctccctcagcccatggcctggtccgacgtatcagaccaagacagacaccgagatggatggtcttgttggggggctgccgctgtttctcataggcaatcctccacctctccctgctaccaaaggcaaaccattcttgacagacactaggaagggagttgtccatttgggccacctgcagagatgttgcgtcccctctacaaatgatgtgaggcatgtccgccctggtccaatccagagtgtctcacctccacagggtcagcttgctcacaaggctcactgcaagagcccaggagacctcatcgccccccaacactgtcactcccccaaatcagaccctctcaacagcgcagaacaagaggacaattcctggtccagcaagaatggagtgagtgaccctcaccagactctcaaaggagccactgctggtttctaaggccgcccccacgcctcatcctcagtgaggccctgctccccgcccatccaggcttctgccttgcctctgtatcctgagcagcatcggagggccccaagcagcagtgaagacccatggaggcctctcactcccccatcccactagggtgtccaagtgctgaccccaaggccctcccatgtccatggggggcccaatggcattacataaccctgagcccaggcctattaagtgcactagtcgagtgaaagcaaggcgggtatgtttagaacaaagtggtcgtcaagattaccttgtccactgagattggggtttgtgtagtcccaagtatcctgatcattcttgaacacattcaagcgtgtaggctgcaaggacaggacaagacaagacttgaggtcagccatgccccagctcacctggaagctgacaaggggcagtcagtcacctcccagatgtacctttgcgtattcgatcttcagagtgcaacagccagaatagatatcagccccattgagagaggccttggcccgctgggcactttgaactgagtcaaatgtgagtcaagttaaggaaagtcccatcacaggagatctttgagaagggcttcaagttaccccagagtgtgataaggacaaggtagcaccccaagactgtggtacagacggaagctttgggattagctcactgcccagccactagcctcaggttaagagaccaaaacggtgttgatggactcaacgctgccccgggtgagcagtcactggccagagttctctcataatctgcaccccgacccatggccaccagcaacctcttctgccacaccactttctccgtctcagccctctcacacccttcgactaaatctgaaacatcaactcgattacagctctgccctgaaagtccatcagtggctttttcctgcccctgccccaagcatcgcaacgctgtctaggatgccctaaaagcttcttccaatgtctattccaaacccgtctgcttgccagccactttgcaatcctcaggtctttcaatttctccatccaacacaagctccttctgactttacaacctttgcagaggctgtttcctccaccttgagtataagctcctatttgctcataggacatcacctcctcagcaaccttcacacatgccccaccttttttttttttttttggatatggagtctcgctgtgttgcccaggatggaatacagtggcacagtctcggctcactgcaatctccgcctcccaggctcaagcgattctcctgcctcagcctccagagtagctgggattacaggcgttcaccaccatgcctggctattttttgtattattagcgacagggtttcaccacgttggctaggctggtctcgaactcctgacctcaggtatctgtccacctcggcctccgaaagtgctgggattgcaggcatgagccactgtgcccggccccatatccccttttaaataaattccttttcccaggggcacattttctcaggacctcttgagactatgttccccaaatctttgtcactcatatttgaacttagaataaacatctttaaaaataaattcctagccaggcgcggtggctcacacctgtaatctgggaggctgaggcaagtggattgcctgaggtcaggagttcgaaaccagatctctactaaaaataaaaaaaattagcaggcgcctataatcctactaggaaggctgaggcaggagaattgcttgaacccaggaggcagaggttgcagtgagctgagatcgcaccactgcactccagcccaggcaacaagggctaaactccatctcaataaataaataagtaaataacagaaagaaaacaaaaagaaaaataaattcctttgtatctcccaacacactgctctctcccctaagatctgcacgtccacacgatatgcctggtcctttaactgcctccctactcagtcactgggctctgtgaaggcatctggcacatggcagccactcccgtggtcagcagacacatgctggctcaaagaatggccactgtcaagccctgcaagagtccctaccctaaggaacacctgttttccagcaaaggatattccaccatcgcctgaactccattcttcctgaaaatgacaattctctggacagggccacaaggattacagatagtgtaaagaacatcctgcaaaagcaaacacaggcaagatgaaggggcactggcagatcagtctggcttgggggagggaataaggggagaaaaggaagggagacctcacaagaaatgcctgctggcacgtaccgtggtgatcgaataaatggggttcaggatggtaaagagaagcacactgttcacgctccgggagtcatccgagtccccagggcgggagatcttctggctggtagagtagttgacaaaagctgggtgaccagcaatgtatatttggttgtcggctgcgtagttcactgcgttgcaagcccccaacacatcttcaaactccaccagtgcttgtctctttttaggcattaccaccacatagctggcagagagaacacaggtttcaatcctctcaggaaaatgtagacaggaggagggtatcatttgattttttgagaactgactcctccatggcctctgaactcctctgcaaccctatcatggttccccgacctgaacaccctgtgccacaagtagtaccaaaagccaaagaggtctagctgagccatcatgtccctctgggaagccttcctgacctctcctcaccagactgtcagatgccacccacagacggcttcttgagcttacactatgacagtgcaaatcactctaggagggcaactttctaagagaagcatccagatacagctcactactgtatttgcagtatatagcatgcaccaaatattcagtaactacttgctgaatgaaagaacactggccaggagcagtagtagctcatgcctgtaaccctaaaacttgggagggctaggtgggcagactgcttgggcctaggagtttgagaccagcctggccaacatggcaaaacctcacctctacagaacaatataaaaattaggccgggcgcagtggctcacgcctgtaatcctagcactttgggaggccgaggcgggcagatcacgaggtcaggagattgagaccatcctggctaacacagcgaaaccccatctctactaaaaatacaaaaaattagccgggtggggtggccagcgcctgtggtcccagctactcgggaggctgaggcaggagaatggcgtgaacccacgagacaaagcttgcagtgagctgagattgtcactgcactccagcctgggcgacagagcaagagactgtctcaaaacaaacaaacaaacaaaaaatatatatatgtaaaaattagccgggcatggtggcgcatgcctatagtcccagctactcagcaggccgaggcagaaggactgcctgagcctgggtgagactgcaccactacactccagcctgggccacaaagcgagaccttgctctgtctgaaaaagagaacactgactagaaactacaaggcagaggaaaaacgaaggaaggaaaaagggtcatggaacttgctgtaatctgacacaaagtacaatggccaacccaaaagcagagcggccacagaatctagaccaggatggcaacaaaatcactatttccaaccagaaatcgtggacacacaaggacacccaggagtcaactttggaagcccaacacctggcctctgagcccagtacctgatgggtccaaactcctgcaaggcctccacaaggtctgcttccaccacaccgtcaatcaggcccctgatgtggacaactggggaggcaggggttttgtgcgggtcatcgtagttctcctgagaaaggaagcaaaaacaagaattattttcttgctgtacaagatgacgccccactggcctctgtactgttgtagacccagtcagataaaacagttggaggtcatccgtgaaggatgcacaggaaagactaggggcagcaattgaagccaatcagcccagaaggattctgggtcagcagaacagtggtcctgagtgggtgatcacttgcccactggctcttgctgtagcttctgaggaaggtataacggagggagggccacacaagtcccaaatcttacgttcttccagggacccccctctcttcccactggtccactcgaccaaggaaacatgggaaaagagtagctggaaaaggagatacactggcagcaagggctctaacagctatctgctacagtttgaatgaggacatcccctttgcatgtgccccaaattccttgccctttaactggctgagccaccatcatctagctaagcacacctgttccccaccactcacacccaggttcagtcagggcaaaaaacaacacatgccccagaaactggggcagccaggccagtcttgaccccttctagtcttgaatcgccctcccaccaaaatctgctttggaaattactgcctaggtcagactaagaaaaaccagacaagaaaagtcttttatttattttttgagatggagtctcactctgtcacccaggctggagtgctatggcgtgatcttagtccactgcaacctccgcctcccaggttcaagcgattctcctgcctcagcctcccgagtagctggaattacaggccctcgccaccacacctggctaatttttttgtatttttagtagagacggagttttgccatgttgaccaggctgttctcgaactcctgacctcaggtaatctgcctgcctcagcctcccaaagtgctgggattataggcatgagcccccactcccggatggaaagtcttttagaaagaccagagactccaacccataccattaagaaccgactgctccttcctaagagaagtatcttacacccaccgacaaaagcctctggtcatcaggagaaagattaactctcttccgcctctcctgggctctggggccggccccctgtctgagaatcactgggcagaagtgcgtggaaggtgggtagaattggattctatttcaggagcgatccacgcgaaccacagggtgaggcactcccgccaggttagcagctcccacaaatgggagttctaactccagccctgcccctcactagctgtgccacctacagtaattcacctcatctcatctctctcctggcccatttcctcctttgtaaatcgggaatcccagtatctcccccaacctcaggaagcgttaaggattttcaattaagatgtctttaaaatgtgtgggacaaggccaagattaaaacgctagcaactcgtaacccctaaaccctggaaaaccctgcaaataggcggccctgtaagacttcaagattttggaaagagtggggactgggccccactccaaaagcaacgactggtgttttcggagggactgattacagggggtcgaaatgcttccaacatggccaggaaatagtttggtttatcaaatcctcggtacccagtgaatccccggaaactgtaagcaaacttgtgatggtttcaaggcttcgctcaactcctaaaaggctaaaagtgcatttcacaagtcctcttcccattttcaatgcctacaaaaatgagagcatctaggctcaaacacatccatttctgtatagacacaaggctgggccttagagattaagctgccatcagacggaattccccactctagagaacaaggccgccgcccacccgttcccgctcaccaggcgctcccctaaccgcccacgaggccgggcgggaacactgcgcctgcgcatggagccagcgaagaaaatgataaaggggaaaaaaaccggccgggccgcgtgcccggcccccacacgccagcccgcggcgcctgcgcactgggccattcgcctcacgagctacttcctctgcgctcccccacaccccgctccggaccccgcgcacgcgcaggcgcctgtcctcgcgcaaaccccgccgtttgcccaacggccgcccctcccccacaccgtcaacgacgcgatggcctgggcgcgtgcgcagaggcccccctcaaaaaataaaatgccctcaagctgggaaattgtcccccagttcccggccttcccagcgcctagggccctggcctcaccccaccgccgccgccgcccgccgccccggctcctccaccgccaccgccgccgcctccgtgctggtcgccggcgttgtcagtcttgagccgcttaggggcccggccgccctcactgccgccgccgtagtagcggccaccgccgcctccgccgcccgccgccgccatcttcaccatcgctcccgaccgcctccgctgctcgtccggctgctgcctctgctccagccgccgacgccgcttctccgcccggggcagcagcctccgcgacatggcggcgcagaacccgcctccccccgcctctcattgggggagggacacgcccgtcacccgccgcccccacccgatagggggagccactggtcccgccgcggggggagggtaggccgccacacgccttgcgcgcttattggacattgcccacgccgttctgcaggagggcccgcccttgtttgtctgagacactccttataggtggtcgctttctgccagtctttccgtcgaccccgccgccttaaaataaaatccaatttgataggtcggatttctggcgctgctggcctccctaaaagcacctgataggaacggcgctctaaacctcccaagaatctccgcctccctcccactttcattggtctcctcgctaatccgtcagcaccagtcacaatgacgaccttcccgcgccacttcgcaaggagacaaggaagccccgcccttttttggtctctctccagtggtggttacagatgcccattcttctgcgtctccactgattggtcaatggagagtggagcgcaccctctcaccagatggtaggactgttgatacgctctgattggatgaaatggggagccccgccccagggtaggcgctctttggtgcagtatacgaaacgagcgaaggcgagaacgcatgcgcaaatacgctttcaggcaccgcccagaggcggggcccccttatggagcgaccgctgtgtgtgcgccggaaggctagaccaagattgacaggaactcccagggtatctctgtcgccatcactataccgtgttcatttctacctctaggaggaattgttaaaatcccaaatctgagccttttcctcagtagaaaaccactcgctgctgccgactgtcttcggaccctgtccagttctaaattcagccgcaacccctttcagtttcccttgggagaaggctcttccgcgcactctccatgtgtgcccatgcagtcccttccacctgcaatagtccactacccctcctgcaggagctaagggccaagtcatcttgtccgtgcgatctaaattaacaggtccctgccatcccagacccccaggattcccttcaaagccataactcgggccagtggttttcacctgacagctcgacccctctgagcaccacaggaggtcctggccccgaccctggagagggtggccacctaccaagcgcccagtacagcacctggcacagtgcaagccccctgcacaggggaggcgttcttgtgatctgtgcctgcgtcgggcctttcttcctcaagggcggggtaagaccacccgcactgcaccaagagaatgtcggagggtatctccagactccggcgaagcccaactggcggagcctggggggtggagaggagcgcgccccagttatcacgcgcaggcagcggggtcaaacggggattaacccgggatcccgtcctacggcatttaacattatggggctgcccgcgcagggtgtgggggggaacaccttagcgaagctattggcaagtgacgatatcgccaaaggggggaaaagaaataaaagcgaagctagcgtcgtgagaaacgcggcggacgccccaaaagtgctccaggacctttctgcccggctgatgggggatttcgagttgaggtccgggtggaaactaagtttgaaatggaggccgtgtgtggtggctcacacctgtaatcccagcacttggggaggccaaggcggaaggctcgcttgagccccggatttcgaggttgcagtgagccgtgatcgcgcccctgcactccagcgtgggcgacggagcgagaccctatcagaaaaaatggggtttatggcaatacaagaggggacaggcctggtggctctgccggtgaggggaaataaagttaggggagggggccttgctggggacctcggtcagctcccccggacaccaggaagatccgaccacgccaacggaacagagacgggggcggggccgcgtctgaagcacgtggcccgcgtgacgggaggaggccgggccggtcgcgacgaagggcggggtcgctccgtcccaacgtcagaggaatgcggtggggggagggggagagagagggcccctcccctccccgcccccgcggccggcccggacgcccctcgcgccggcgcgcacggccggagcacggcggaacggtctccccggcgccgcacgttccaggccgccggcccggcctggtgacccgcaccccccgcgctcccggccaccgccccgcccccaccccgctgctcggaccctggcccccggccgcgcgcggcgccgcccgccagtgccccggtcaccttcccgcacccctcgcccccagcccctaccagctcggcggcgagcctgaccggccgtcccggatcgaaaagagcagacactgggaagttttgggagagggaggggcgggccttaaagggaccacgaccttttttcagccccgtggggggaagaaaaattgggggcagggggcgcgggagcggggacacggcaggagaccgagggtcgccccgcgggggaatggaggaaaccaggcgagaaaggagcgggaagaccttggagccgcggtgttcgggctccgcgtcccttttccccaaaaatccacccccgccccccgcagacggaaagtcacgcagttgtttgagactcgcgcatctttcctcctggtcaggcaagtgtcttggctgaggcaagtgtttggggtgtacattgctcacataaggaaatgggctggagggacgcaagtgactaacccaggatgccacagcttgcaagtggcatggcggggctggtctgacgccggagcagacgcatcaccactgcacttgcagggcttattagggtgatggggtaggctgtagagatggggggttcagagcaggggactggagccaccctaccggggttccaacgtggaagctgcatttactgtctctggccttaggaaagtaacttagccttcctcatccgttagggggatggcagtaggagcttcgtctgggtcgtcatgaggaatgcagagaatggaaacgggaccttagaggactacccccatttcacagttgaagtaaaactggcccagagagtggaagaaccgcgaaaaattaccacagctgggcagcctctgaaagagcaggtcgctcccgttcttaatccacacaaaacttaatcggacccttgcagatccttgtaaacccatgccagccgggcacggtggcttcccctgtaatcccagcactttgggaggccgaggtgggcagattgtttaagtccaggagctcgtgaccagcctgggcaacatggtgaaaccttctctctacataaaatacaaaaaaattagctgggcgtggtggcgtgcaactgtagtcccagctactggggaggctgaggcggaaggatcacttgagcccaagaggtggaggctgacaaagcgagaccctgtctcaaaaacaaacaacaccccagaaaaatatggctgggcgccgtggctcacgcctgtaatcgtagcactttgggaggccgaggcaggagaatcgcttgaggtcaggggttcgagaccagcctggctaacatggcgaaacccggtctctacttaaaatacaaaaattaggctggcgtggtggcaggcgcctgtaatcccagctactcagaatgctaaggcaggagaattgcttgaacccgggaggtgaagtttgcagtgagccgagattgtgccactgcactctaacctgggcaacagagtgagactctgtctcaaaaaactaaaataaataaaataggccgggcacggtggctcacacctgtaatactagcactttgggaggctgaggcggctggatcacgaggtcaggagatcaagaccatcctggctaacacggtgaaaccccgtctctgctaaaaataaaaaaaaaattaaaaaaaaaattagctgggcatggtggcaggcgcctgtagtcccagctactggggaggctgaggcaggagaatgacgtgaacccaggaggcggagcttgcagtgagccgagatcgctccactgtactccagcctgggcgacagagcgagactccgtctcaaaaataaataaataaaagtaaaaaataaataaataaataaaataaagaaaaaatagtaatgctgctgtgaccattcctagtgatatcttcttgtgtccatgtgtgagagttttaagggcatgtaggtaggagtgggattgctgggtcgtgtaacatattttgacattattgggtagtaacaaattgttattcaatatatctgtaccatatattcccaccagcagtatatgagaaggtctcattcttttttttttttcttttgagacaagagtttcaatttgtcccccaagctggagtgcagtgatgcatacacagctcactgcagcctcgacctcctaggctcaagtgatcctcccacttcagcctcctgagtagctgagaccgcaagcacatgccatcataccctaatttttttttttttttttttgagatggagtctcactttgttgcccaggctggagtgcaggggtgtgatctccactcactgcaacctctgcctcccaggttcaagcgattcctctgcctcaacctcctgagtagctggaattacaggcacacgccgccatgccaggctaatttttgtatttttagtagagacggggtttcaccatgttgtccaggctggtcttaactcctggcctcaagtgatctgcccacctcggcctcctaaagtgctactagcattacaggcatgagccacagcgcccagccaccctaatttttttaaatttttttaatttttttatttttatttatttttttttttgtagaggcaggggtctcactatgttgcccagggtgatcttgaactcctgggctcaagcaatcctcccacctcagcctcccaaagtgttaggattgtaggtgtgagccatggcaccaagcctaggtttctttttttttttttttaatttaatttaattttattttattttatttattttttttttattgatcattcttgggtgtttctcacagaggggcttttggcagggtcataggacaatagtggagggaaggtcagcagataaacaagtgaacaaaggtctctggttttcctaggcagaggaccctgcggccttctgcaccgtttgtgtccctgggtacttgagattagggagtggtgatgactcttaaggagcatgctgccttcaagcatctgtttaacaaagcacatcttgcaccgcccttaatccatttaactctgagtggacacagcacatgtttcagagcacagggttgggggtaaggtcacagatcaacaggatcccaaggcagaagaatttttcttagtacagaacaaaatgaaaagtctcccatgtctacctccctctacacagacacggcaaccatcccattcctcaatcttttccccacctttcccccccctccattccacaaagccgccattgtcatcctggcccgctctcaatgagctgttgggtacacctcccagacggggtggtggccgggcagaggggctcctcacctcccagatggggcggccgggcagaggcgcccctcacctcccggacggggcggctggccgggcggggggctgacccccccacctccctcccggaccgggcggctggccagacggggggctgacccccccacctccctcccggacggggcggctggccgggcggggcctgacccccccacctccctcccggacggggcggctggccgggcagaggggctcctcacttcccagtaggggcggccgggcagaggcgcccctcacctcccggacggggcggctggccgggcggggggctgaccccccacctccctcccggacggggtggctgccgggcggagatgctcctcacttcccagacggggcggctgccgggtggagaggctcctcacttctcatacggggcggctgccgggcggagggtctcctcacttctgagacggggcggccgggcagagacgctcctcacctcccagacggggtggcggccgggcagaggcgctcctcacatcccagacggggcggcggggcagaggcactccccacatcccagacgatgggcggccgggcagagacgctcctcacttcctagatgtgatggcggccgggaagaggcgctcctcacttccgagatgggatggcggctgggcagagacgctcctcactttccagactgggcagccaggcagagggactcctcacgtcccagacgatgggcggccaggcagagacgctcctcacttcccagacggggtggcggcctggcagaggctgcaatctcggcactttgggaggccaaggcaggcggctgggaggtggaggttgtagcgagccgagatcacgccactgcgctccagcctgggcgccattgagcactgagagaaccagactccgtctgcaatcccggcacctcgggagtccgaggctggcggaccactcgcggttaggagctggagaccagcctggccatcacagcgaaaccccgtctccaccaaaaaaatacgaaaaccagtcaggcgtggcggcgcgcacctgcaattgcaggcactccgcaggctgaggcaggagaatcaggcagggaggttgcagtgagccgagatggcagcagtatagtccagcttcggctcggcatgagagggagaccgtggaaagagagggagagggaaaccatggggagagggagagggacagggacagggagagggagagggagagcgcctaggtttcttctgctgttcttttccaaaacttcttaaattttgatacgtctttctccttttctaatataagcacggaggctctgaatttccctctccattttaatttggctgcattttacagaaaggtgttttggaacttccattctaatttctctcagacagatggcatttttaacttattttgttgttgtggtttgctaaaatacttgcaagttggtacattttgcattttgaaagattttgccaaattaccctccattagcactgtaacaatttgagttctcagcatttctatgtaaaaaatgaattttccccactatctcaaaatactgcacattttgttttacatttgtcaatctgaggtaaaaactggttttaattttaatttactttatatttaccttattgaatgaatcgtgtgtgtgtatgtgagcgtataccatatgtgttcacatgggaattggaacagctagagaaaaaacatcccagggagaagaaacagcaaatgcaaaagccctgaagtcggctgggcatggtggctcacgcctgtaatcccagcactgggaggccgaggtgggcagatcacgaggttcaagaccagcctggccaacacggtgaaaccccatttctactaaaaatacaaaaattagttgggcgtcgtggtggttgcctgtaatcccagctactcaggaggctgaggcaggaaaatcacttgaaaccggaaggctgaggttacagtgagctgagatcacacgccactgcactctagcctgggcaacgagcgaaattccgccacacacacacacacacacacacacacacacacacacacacaaaaagccctgacatgagaactgaagacctttgtggctgggcagagggagtgacagggtgagtctgaggggacaaggtcagaggggtgatgggggcacgttatgtggggcccactgagacgggctgaggatgaggactttggtcttattactaagtgagaaaagaaccatgagagggttaaaaaccagaatgacaagctgagcatggtggctcaagcctgtaatcccagcactctgggaatgttaaggcaggaggatcccttgaggccaggagttttagatgagcctggctaacatagtgagacaccatctctacaaaaaaaaagtaaaaggccaggtgcggtggctcatacctgtaatcccagcactttgtgaggtcaaggcgagtggatcacctgaggtcaggagtttgagaccatcctggccaacatggtgaaaccccatttctactaaaaatacaaaaattagctgggcatggtggtgggtgcctataatcccagctacttgggaggctgaggcggaagaatcaacttgaacctaggaggcagaagttgcagtgagtcaagactgtgctattgcactccagcctgggcaacaaaagtgaaactccatctcaaaaaaaaaaaaaaaggaaaaaaattagctgggcatggtgtaatgcccctagtcccaggtcctcaggagactcaggcaggaggatcacttgagcccaggagtttgaggctgcagtgagctatgattgcaccactgcactttagcctgggcaacagagtgataacttctttccaaaaaactccacaaaaaacagaagagtgatgagatcagattttttttggattaaaaaatataacatctttattaagctatatttcacataccataatattaactctttatatatttatttatttatttgagacgcagtctcgctttgtcgcccaggctggagtgcagtgatgcgatctcatctcactgcaacctctgcctcctgggttcaaacgattctcctgcctcagcctcccaagtagctgggattataggcacctgccacaatgcccggctaatttttgtatttttagtagagatggggtttctgcatgttggccaggctgacctcgaactcctgacctcaggtgatccgcccgcctcagcctcccaaagtgctgggattacaggcgtgagccattgcacccagccaaatattaactcttttaaagtgtatgactggctgggctggtggctcacacctataatcccagctatgtgggaggccgaggtgggcaaatcactgaggtcaggagtttgagaccagcctggtcaacatggcgaaaccacctctctactaaaaatacaaaaattagccaggcgtggtggtgcacgcctgtagtcccagccactctggaggctgaagcaccagagtcacttgaacctgggaggaagaagttttgtgtgtgtgtgtgtatgtttgtgtatatgtatgattgagtgttgagtggtttttagtatgctcacatagtcatgcaaccatcatcactgtctgattctggaatattaccctcaaaaggaactccataccctttttttgtttttcgagacagagtcttgctctgtcgcccaggctggagtgtaatggcgtgatctcgccgcactgcaacctccgcctcctggttcaagcaattctcctgcctcagcctctggactagctgggattacaggcgcccaccaccataccccgctagtgttttgaatttttagtagagacggggttttgccacgttgcaatccgcccacctcagcctcccaaagtgctaggattacaggcgtgagccactgtgcccagcctccatatccttcagcagtcactcccctcagcccccggcagccgccaatttactttctgtctctatggatttgtctagtctggacatttcatattgtagggtccagccctacggggcttagcaggtgttctccccgtgtgcagagatgagagatggtaataaataaagacacaagacaaagagataaagagaaaacagctgggcccgggagaccactaccatcaagttgtggagactggtagtggccccgaacggctgggcgcgctgatatttattgcatacgagacaaggggggcagggtaaggagggtgaatcctctaagtgattgataaggtgaagcaagtcacgtgatcataggacgggggtggggggcccttcccttttaggtagccaaagcagagagagaaggcagcatacgtcagcgttttcttctatgcacttataagaacgatcaaagactttaagactttcactatttcttctaccgctatctactaccaacttcaaagaggatccaggagtacgggaggaacgtgaaagtggacaaggagcgtgacctttggagcacagcaccacagggaggggtttaggcctccggtgactgcaggcaggcctggataatatccagccttccagaagaagctggtggagcagtgttccctgactcctccaaggaaaggagactccctttcgcggtctgctaagtaatgggcgtcttcccagacactggcattaccgcttgaccaaggagccctcaagcggcccttatgtgggcgtgacagagggctcacctcttgccttctaggtcacttctcacaatgtcccttcagcacctgaccctatacccaccggttatccttagggtatattagtaatgcaacaaagagtaatattaaaagctaatgattaataatgtttataataatgattgataattgtccatgatcatctctatatctaatttgtattatgactattcttattctaactattttctttattatactgaaacagtttgtgccttcagtctcttgcctcggcacctaggtaatctttcacccacatcatataaatggaaaaatatagtatgtagccttttgtgtctgattctcttagcatgttttcaagtttcacccatgttttttaaattaaattaaatttttatttttgggggacggagtttagctcttgtcgcccaggctggagtgcaatggtgcaatctcggctcactgcaacctctacctccaaggttcaagcgattctcctacctcagcctcccaagtagctgggactacaggcgcccgccgccatgcccggctaatttttgtaattttagtagagactgggttttgccttgttggccaggctggtctcttatctcctgaccttacgatccgcctgcctcggcctcccaaagtgctgggattacaggcatgagccactgtgcccgacctgctttcttcttttttgttgttaagcctcctccggctccaagcagaaatagcttcacggtctgctgtgcttcagattgaaaactcagacaccctcagggaccagtggggaaagccaccccttagaggaaagtttctcatttgcattacgcagtcctgaccctttccctacctttccccgcccccagcttcaatcaggtctaactgatatgtgagaaaccagacctttaaagtgtacaattgatgagttttaacttacatatacacctgggaaaccatcaccacaaatcaagatagtgaccacaaggtaaaaacagtattcatcatccccaggaagtgtttttgtttttttgttttttgttttttatttttttttttgagatagtcttgctctgctatccaggctgaagtccagtggtgtgattatagctcactgtggcttactcccaagtagctgggactacaggttcctgccaccccatggccattttatatatatatatatataatatatatgtatataaaatatatatatagttatatatatacacactatatatactatatattatatataatagttatatataccatatattatatatactatattatatatagtatatcatatatagcatatattatatatactatattatatagtatctcatatatagcatataatatatactatattatatatagcatatcatatatagtatatataatatatactatattatatatagtgtataatatatactatattatatatatattatatatataaatataattgggtttttttttgtttgtttttttggtagagatggggtcttgctacgttacctcggctgatctcaaactccgggcctcaggcaatcctcctgcctcagcctcccaaaatgctgggattacagtagtgagctaccacacccacagaagttttcttttcgtttttgagacggaattttgctctgtcgcccaggctggagtgcagtggcatgatctcagctcactgcagcctccacctcctgggttcaagcaattctcctgcctcggcctccctagtagctgggattacagacatgcaccaccatgcccagctaatttttttttttttttttttttgagatggagttttgctcttgttgcccaggctggagtgcaatggtgtgatctcggctcactgcaacctccatctcccaggttcaagcgattctcctgtctcagcctcctgagtagctgggattacaggcatgtgccaccatgcttggctaaatttttttgtatttttagtagagacggggtttctccatgttgattaggctggtcttgaactcctgacttcaggtgatctgcctgccttggtctcccaaagtgctgggattgcaggcatgagccaccacacccagccgctaatttttatatttttagtagagacagggtttcaacatgttgcccaggctggtcttgaattcctgacctcaagtgatccccctgccttggcctcccaaagtgctgggatgggtgtgaaccaccacgcctgcagaagttttcttgagcctccttgtaaaccctctgtttttcactgtcccccgcccagtgttacagaccacaagttcttgggatctgaatgcaactgaaattgacttgaggccaaaacagttttcccagacaagacttcattggagtttatgcctgggtatgagggagacagcacaagagaaagagagcaaatttgctggctgactcttggaaaagagccagtagggcttttttattaggcaaagctctggaattgacattagcgggaggatatacaggctgagctgggcaaaacatgtgaggagtagagcactcatgaggacacttgtctggctgcgatggttatcttgagtaatgggccacatggtgttctggcaggtgcaacaaggctgtaaatcaattgttcagctttccttccggagctgggacactcacaccctcggttacttcctaaggccagttcctgaaattctttttttttcttttgtttgagacagagtcttggtctgttgtgcccaggctggagtgcggtggtgctatcttggctcactgcaacctccttctcccaggttcaagtgatcctcctgactcaacctcccgagtagctgggattacaggcgcctgctaccacgcccagctaatttttatatttttagtagagatggggtttcaccatgttggccacgctagtctcgaactcctgacctcaagtgagccacccgcctcggcctcccaaagtgctgggattacaggcgtgagctaccgcgcccggtctcgctattgattctttttgcttccacggacaactttttatttcctatcttccatctgtgagggcgttcaggacttttgggcctttgtgagtaaacagtcaactctgtggagcggagaccctagagaatatggccagagagaaatgtgagctgtactccattggcagctagcaaaactttcctttctttgagctgtctttgcagtggttctagatcttgggaggacggctgtagatgccctgcatccttggttaagtcataaccttggttaaggcttataggtttcacttgggagagtacctgtggtgaagaagttcacaagccaggaataccagctgtttgtcccaactaaaagctggtaatacggctgggcactgtggctctcacgcctgtaatcccagcactttgggaggccaaggcgggtggatcacctgaggtctggagttcgagaccagcctgaccaatatggtgaaactctatgtctactaaaaatacaaaaattagccggacatggtggtgtctgcctgtagtcccagctacttgggaggctgagacaaaagaattgtttgaacccaggaggcggaggttgcagtgagctgagattgcaccactgcactccagcctgggcaacagacagacactccatctcaaaaataaaataaataaataaataaatttatttattttaataagaaatttaatctggtaataagaaatttaagagtagttattttaaagagctttatagttagaagtcagcttaatcaaaagctaatatccaagtttttttttttttttttttttttttttttaagactgagtcttgcttgtcacccaggctggagcgcagtaacacgatctcggctcactgcaacctctgcctcctgggttcaatgaagccattctcctgcctcagcctccccagtagctgggattacaagggtgcaccaccacgcccagctaatttttgtatttttagtggagacggggtttcaccatgttggccaggctggtttcgaactcctgacctcgcgatctgcccgcctcggcctcccaaagtgctaggattacaggcgtgagccaccatgcccggccccaagttttatatatatatatatatatatttaaaagggctttctgacttttctctttgaatcttttttcgtggactagaactttttttttcaaaaacaaaaaaaccctgtgtgcttggtatgaccacttcctttgttcacttcctccctttttctttttttcttctttcttgaggtggggtcttgctctgttgcccaggctggagtgcagtggtgtgatcacagctctgcagctttgacctcctgggctcaagcaatcattccaccttcacctcccaaagtgctgggattacagacatgagcttctatgcccggcccacttcctttattaaaaattatttttccatgatgtgagtgagagcccaaggggagacttctagcatgaagcccagagctccacagcaaacaggagcttgagtttgaccctaagccctcaaccagcgataccccaaacagctgccatttgagtttcacgtcccttttttttttttttttgccacacattcatgcatcacctgcccacttcactgcttaataattttctttaaatcaacccactcttttgtttttaattcaacacatttatttaaacaggagatgtcatttcactccaggaagtggaaaaccagtgtcagttggcacacatagactctaatagtacaaataaatccaatgattcagcaacaacagagaagtgctaaaagcattgggtgaaaggtgttgaggaacaggttggtcaccaggtctcaaggtgacacccacagatgatgcaagaattcaaaggctcacgcctataatcccagcactttgggaggccgaggcgggtggatcacttgaggtcaggagttcaaaaccagcctgggcaacatgacgaaaccccatttctacaaaacataccgaaaattagccgggcatggtggtggtgtgcacctgtagtcctagtactactaagctgaggtgggaggatcgtgggaggtggagattgcagtaagcctagatcacaccactgcactccagcctgggcgacagagtgagaccctgtctcaaaaacaaaccgacaaacaacaaaaaataaaacaaaaaacaaggggagaagatgaccatctgcaagccaaggagagagccctcagaaggaagtctattgtgctgacacctcgaactggaactattgtaaccgcccaaggggttcacgtttcctgctgcctagacagagcccatacatcaaaacaggggaattgcaatagagaaagagtaattcgctgggcgcagtggctgacgcctgtaatcccaccactttgggaggctgaggtgggcggatcacgaggtcaggaaaccgagaccattctggctaacacggtgaaaccctgtctctactaaaaacacaaaaaattagccgggcgtggcggcacgtgcctgcagtcccagctacttgggaagctgaggcaggagaatggcgtgaacccgggaggcggagcttccagtgatgcaatgagctgagaccacgccactgcactccagcctgggcaacacagcaagactccgccttaaaaaaaaaaaaaaaaaagagtgattcacgcagaggagccagagcccgctgtgcgctgtgcgggagaccggagttgtattattactcaaatcagtctccctgagcattctaggatcagagcttttaacaacaacgcggtgggtggggggaagctagtgagccaggagtgttgattgctcaggaatgaaatcatagggagtcgaagctgtcttcttgagctgagtcagttcctgtatagggggccacaagatcagaagagccagtttattgatctggtggtgcccactgatccatcaagcgcagggtctgcacaatgttccaagcactgatcttaggagcagtttagggagggtcagaatcttgtagcctctggctgcatgactcctaaaccataatttctaatcttatgattaatgttagtcctacaaaggcaatctagttcccagacaagaaggaggtctgctgttgggcgcggcggctcacgcctgtaatcccagcgctttgggaggccgaggtgggctgatcacaaagtcaagagatcgagaccatcctggccaacatggtgaaactgtgtctctactaaaaatacaaacattagccaggcgtggtggcacatacctgtagtcccagcaactcaggaggctgaggcaggagaattgcttgaacccgggaggcggaggttgcagtgagctgagattgtgccactgcactccagcttgggcaacagagccagactctgtctcaccaaaaaaaaaaaaagaaaaaaagagggagttctgctttggaaagggctgttttcaactttgtttaaactataaactctttctctcaaagttagttcggcctacatctaggaatgaacaaggacagcttggagattagaagcaagatggagtcaattatgttagatctctttcactgtctcagtcataattttgcaaacacagtttcactgggaggaaataaatttctgttgtttaagccacacagtctgtgatcttttttttttcttttttgagacagagtctcgctctgtcgcccagactggagtgcagtggcacaatctcagctcactgcaacctccgcctcccaggttcaagcgattctcctgccccagcctcctgagtagctgggattatgggcgcgcatcaccatgcctcagcctcccgagtagctgggattacaggcgcgtcaccatgcccggctaatttttttttttgtatttttagtagagacggggtttcaccatgttggccaggctggtctcgaactcctgacctcgtgacccacctgcctcagcctcccaaagtgttgggattacaagcgtgagccaccgcacccggccatctgtggtctttttgatggcagctctagccgactagcctatctccttagctcaatggtcaaagttagctttaccaatcacggcccctgatgggattcaggtaccgagaaggacacagcgtccctgcggagtattcttccccacagctgcaagaccagattttaatcatgaggaagcagcagacgaggccagaaactgggactgtccacaggacaactggccagggctcttcgaacagccagggtcagtccagctgctacacatgtgaggtaagaaaaaaaaaagccaacgtcaggagcctctctgaacctattgtggtttggaggctgtccagtttatttacaaattgaaaaaaagttatatatatataaattattatattattgttttataatatttatattattttataaattaatataattattatgattataaattaaatattttaatttatatataaattattttttatttttgtaaatatataaatctatctatatatagatatatctatacgtatagacacagatagatacctcatgtagctagtgcatacttgaaatgtgactagtccaaactgtgatgtgattaagtgtaaaatgcacagtaaatttcaaagctttagcatacacacacacaaacatacaaagttttaaatatgtcagtaactttttaatatggatacatgttgaagtgataatatttgggatacattgtgttaaatcaaatatattattattaacgttaacttcacttgtttctttttatttatttatttatttttgagatggtgtttcactcttgttgcccaggctggagtgcaatggcgcaatctccgctcaccgcaatcttcgcctcccgggttcaagccattctcctgccttagcctccggagtagctgggattacaggcatgcgccaccatgcccggctaagtttgtatttttagtagagacgggtttctccatgtttgtcaggctggtcttgaactcccgacctcaggtgatctgcccaccttggcctcccaaagtgctgggattacaggcatgagcaaccgcacccggcctcacttgtttctttttagttttttaaattgtagttactatgaacaatgaaatacataaatatatggtttgttagcatgtgatacattctttgggaaaaacgatcacaattgggcacggtggctcacgcctataatctcagcactttgggaggccgacgtgggcagattgcttgaggttaggagtttgagaccagcctgggcaacaaagagagacctcatctttataaaaaattttaaaaattagacaggcacggtggtaggtgcctgtagtctcagctacttggtaggcagaggcagggggcttgtttgagccaggaggttaaggctgcagtgagccgagatcatgccactacactccagcctgggcaacagacagagacgttctttcaaaacaaaacaaaaccccctgttcctcaagcaagatgccagacgtacctgggtcagtccagactcctgacctatgtggtttaggagcagcaaggaggagggaggggtcccaggaaaagggaacagcctacctctgggcctttgcactggctcatcctgcttctcggaatgctcttcctaatacccactctgctcctcccttcccctcccctccttcaggcctttctgcagatgtcacctcagtgaggctttctctgatacgcctgtctaaaactgcaaagcctcctgagtagctggtaccacaggagtacgccaccacgcccggctaatttttgtttttttttttttttggtagatgggggtcccactgttttgcccaggctggtctcaaactcctgggctcaagcaatcctcccaccttggcctcccaaaatgttgggattacaggcatgaacggaggggtgtgaaacccctagttgtcactggtccctgtcacagtctcttctgcccatggctccttaaagggcaggttggcctgtggggagaggtgggagctgggtcagaagggcaccaggtctcaccctcccttctacttgcagccagatgggcagtcacctgggctctgggatgatcctttctgtgcagcgtccgcctgcggtgccactggtgcagggaggcgcgggcctcggagctgagcccccggggagcgcggtctgtttcgggctggtagtgggcaatgtggtgcagcgccccaaaccacgtggtcaggtagtacccagctggggacagaaagggaagtcagctccgccctctcggcttccctggtcgccccaaatccccctgcagtttgcctgccgtccctcctgctgcggggggaggctgtttgggatcccggaggtactggatcgctgggctccagcattctggagttgggggctcaccctctccccgcagctcatctggatctaagagctccataagaaactctacgtccagctgcgtgtccccaatgtccgggctccagatgagttcctcggtcagcgccggcaggaaggcgtcggcccccaggggatctgggaaaaccagaggaaaggtcttgagatggatccccatctcaaggcgcgtagacaccttccatccgatccccaggaccacgagggctggctgcccctccaccttgtcgggcatgacagcgcctcctaccagaatcttcaggaccgcatagattcctcccaccagtgctaccctctcccgcctggctccaactctcaaggctctccccaccacgctagacgttgacccctcccttaccttggttctcgcctcgagccaggcccgcatagacatctctgcacacctccaagaggagcgccaccttgcggcgcggggcgcaggcagcgtggaggtgcgcaaggcgctcgtggatgcggctccgcaaggcgggggcggggctctgcccttccggtcccggcccctgtgcccccggaggccccgcccccgcccgcagggctgtctgtcgccgccgcagccgccgcagctccggtgctcggagtgtgcggagtcgtgtccacagggccggcttcaggggcgccagcaccgcctggcacaccgccgtctccagcgcggggcctgcggggtgtgggggacgggtgagcacaggaccgccaagttgtcccacgcccacccacgcgctccaacaacccaccctggcccacagccacccctgcctagctctggtcccccgtgagtgtagacatggttgtgaacatgtgtggaagagttagcctgggtgtgaacttgcgcgcatacgtgggcgatagaacgcgtgggatgtgtaggaagggcgtgtgggtgcagaaggaaacgtgtgcgcaccgatggagaggacgaagttgcacacttgaacccgtgggggctcccttccagtcctcccattacctggatcctcgtccttcttggggagcccaggacccctgcttccaaagacagccctgatgtaggagtcctttgccaggtgatcctggaggtcagtaaggaggtgccgcacatcctgaagcagctccgtggccgggtccccagacccgtggggacccccagaatctgaggcgatgcgcacccgaaggcttcggtactgcctggccacgtagctgctccgggccctgaccagagactggacgtgaatggtgagcacgtcctcagggccttcctcttcagggtcgtcctcccttccttcctcctttccttcaaggtcttcctcctcctcttccagtaggctggcgagagccggcccaggatggtccacttccgggctgagcgggcctttcacccaggagaccccgtgaggcgcagggttcctgggggctggaagtgaggagggcattcggtcgcctagaacaggggcagcagctccctccccttcagaggcccagggccccgcccagctaacctggatcatgtctctgagcagcctctggctctgtttcttgaggggtctgctccctcccccagcctctgtgggtctccaggtagagctggttcacaatggaaagcaccttccctggggtgtcctgttggaccctgccgatctgcacaggatctggagccagcagaagtgagaaggtgtcctaggtatccaagggaccaaccctggtcccctcaaggcgccaggagacttacttcccagcttcattgctggaggtgctgaggcttagctcctggcccctcctcagtcagacccaggagtccaggcccctagtccccttctcacttaggcccaggcgtccgggacccccagttccttcctcctccaatcctctcctctgttaggacctaggaatacaggcccccatcccctcctccctctgggactacaaagtccaggcccccagctctctctagtctccagttctatattctcctcaaacccagtagtctgggccccaaagccccattcattcccttggagcaaggaaattggcaggttggctgtgccctctttagagaaccgtgcctcacctgtgtgttcatctctgggccctagagtgggagggggcaagagcagggttctgggcagaacatccctgagaataaagaggtgggagccacagtgtcagtggggtgtcttagggaagggtcccccttagtgcctcagatgggtgacctgtacctgctggctgatagaaaggccaggagatggggcaggtctggcatgcagaggttggaggattccagggacacacctgtggtggggggaggaagaaggagaaagtaaacttgagtggtggcagttttctgtcccctgggatgctcttgctcctccattccttcagaatccccccagggaccttcagaacagggaagttcccactctttggagtctccatctttactcttgtgtaccacttatgccaccaacaaggattcattcattagacaaacatttactgagcccttagtcctttctaggcactggagatacagttatcaaaaggcagacaagttcactgccttcctgtagcttaccttttagcggggggcggagggggaaaaggcagaatataaatgaataaacagtcagggtacggtggctcacgcctgtaattctagcactttgggaagccgaggtgggtgaatcacctgaagtcaggagttcgagaccagcctggccaacatggcgaaaccccatctctattaaaaatacaaaaattagctgggcatggtggtgggcgcctgtaatcccagatacttgggagcctgaggcaggagaatcacttgaactcgggaagtggaggttgaagtgacctgagattaagccattgcactccagcctgggcgacaaaagtgagactatctcaataaataaataaataaataaataaaaataaattttaaaaacgagtaaacaaagtggatattgtattgagtgctatgaagaaaatggagtgattgaaagtgaccaagaggccaggcatggtgacttacgcctgtaatcccatcactttgggaggctgaggtgggtggatcacttgaggtcaggagttcaagccagcctggccaacatggcaaaacccatctctattaaaaatacaaaaaattgggaggtgggggcctaggggagggatagcattaggaagaaatacctaatgtagatcatgggttgatgggtgcagcaaaccaccatgacacctgtatacctatgtaacaaacctgcacattctggacatgtatcccaaaacttaaagtacgataaaaaataaataaataaaaataaaaataaaccaaaaaattagtcatgtgtggtggtgtgcacctgtaatcccagctacttgggaggctgagaggcatgagaattgcttgaacctgggaggtagaggtggcagtgagttgagattgggccactgcactccgcctgagcgacagagtgagactctgtctaaaagaaaaaagaaaaagaaagtgaccaaggtgccatcttttaactatgatggtcaagaaaggttacatttctgcagaggcctggaggatggagactaaaccagcccctctaggaaaagcattcatacaggatgaacccaagcagaggtcctgaagctggaacacacttagcatgctaaagacacacagagtgtaacagtgtgtatggggcagagtgaatgaggggcaatagatagagagacaggaaggaactacatcacacagcaccttatagatcatgacaaggagtttacattttgtatctaaggacgttgcatgctctttgcaggatttggggcaggggtgtataacatctgattgatactgaaaaatatcttgggctcagaatggattgtgggaaggaaagggagacaggattggaaatattcatcagatattttggaaacaaagctgacaggtgtttttgttttgttttgttttggcagggtttccctctgttgccaaggctggagggcagtggtgtgatcttggctcactgcaacctctgcctcctgggttcaagctattctcgtgcctcggcctgccaagtagctgggattacagtcgcgcgtcaccaagcccggctaatttttgtattttttgtagagacggggttttgccatgttggccaggctggtctcaaaatcctggcctcaagcgatccacccgcctcgacctaccaaagtgctgggattacaggcgtgagccaccgcgccggtccagctgatagttcttagtgatcaattgactgtgggctggaacctcaggggaggtgccttacctctgggaatcttctggatctggtaggtattgacttctcctggtaaaggtcctgacctcaacaccagggcctggctggggtcacgtcctgtgaccaagaaactctgggggatagagacaaaggccagcgtgacaaaggtgtgcgcagatgtctgttgcttttgcctgactagcatccatttcccttattttgggttccacaccccaaatttcctttagggaaaccctctccctactttcagtccatgtgtgttgggctgacttcccccaagccctggcggggtgggcccatgacctgatctagccaacaggatgagggtgctctcggcccactgtttggttcagggaacaggcatgtgactcaagctcagccaatggacatcttccacaggatttttttttttttgagacggagtcttgccctgtcgcccaggctggagtgcagtggcacaatctctgcccactgcaacctccgcctcccggggtcaagcgattctcctgcctcagcctcccaagtagctgggattacgggcgactgccaccacgcccggctaagtttttgtatttttagcagagacagagtttcaccacattggccaggctagtcttgaactcctgacttcaagtgatccgctcttctcagcctctcatagtgctgggataataggcgtgagccactgcgtgctggagctcttttggaaagacttcatttgttacactggtgttgctaaactggtgggatacagctctgagctgggaaggatgataccctcctgaggaggaagctgtggtagcccccgtttgctgtcgtctccaaacctattccacattccttgcagaattccttgttcacggcattaatatacccagccatgagtatgattgatatatggatcatgattgatataggtggtggttcttagctctggctgtatacgtcccaagagagctgttaaaaatattgctacagccgggcacggtggctcacgcctgtaatcccagcactttgggaggccgaggcgggtggatcacctgagggcaggagttcgagaccaccctggccaacgtggtgaatcccagtctctactaaaaatacaaaaattagccgggtgtaatggcgggcgcctgtaatcccagctactcgggaggctgaggcaggagaatcgcttgaacccgggaggcagaggttgcagtgagccaatatcgtgccactgcactccagcttgggtgacagagggagactccatctcaaaaaataataataaaaataataaataaaaaaattaaaaatattgctacctgggccccatccttttttttttcttttttcttttttttttttttttaatagagactgggccttgctctgttgcccaggctggtcttgaactcctaggcttaagcgagcctcctacctcagcctcccaaaatgctgggattacaggcgtgagtcagcacacccggccagccatctatattttctgaatcagttgtgaaaacctttattttggccggggacggtggttcacacctgtaatcccagcactttgggaggcagaggtgggtggatcacctgacgtcaggagtttgagaccagcttggccaacatggtgaaatcccatctctactaaaaatacaaaaaattagccgggcgttgtggcagatgcctgtaatcccagctactcaggaggctgaggcaggagaatcgcttgaacctgggaggcggaagttgcagtgtgccgagatcatgccattgcactccagcctgggcaacaagagtgaaactctcaaaattaaaaaaaaaaagaaaagaaaacctttatttttcctgtaaaataaacagatgcaagtggtgcctctgttcttcctgcctggaatgcacgcaggtgcttgggcctggggcagcccccgggaagctgtgagagaagtccaagagaattatagctatgctggcctcaatgtcactgcactgctgatctaaagccagcagctgcctttttggttatgttaggaagataaatgcctatttgtttaaaccgctgtaggacaggtgtttgttatattcagtcccaaatatccaaaattccccgcagttgaaagcaaagccaagaaatgggatgaagaggaatttataagtgttctgaagttcaggatccagagcttcttgaaattacatttttttttttttttttttagacagggtcttgctccatcacccaggctcaagtgaagtggcatgatctcagctcactgccgccttgacctcctgagctcaaatgatcctcccacctcagcctcatgagtagctaggactgcaggcatgagccattgcacccagcaataaatagcctttttggtttgcccaatttgtgtcatgtttgtcactagtaaccagcagagtcctaatctagggtgtcaggatgggcccccagctgtgagtactcacccctagtggccacagccccacaagggcctccgcatcctgggtatccagctctggcacatgccacaccccccatgtcctctgcaggcgagtaagtggctctagggtgctgaggacccctagaggggtcctgtctgctttgttcacctgtggtgggaccagcctgggatggacagtgtccagggagtcaggggtcagaggtgggcagtgggacaatgaggtgaggtcaaaggtacaggaaggggcaggcccagggcagaggctcagagatgtgattcaggattctgtagtgagggaggtattggatggaaagggtttctggatgcaggggaaggagggcatagcctcagccctagtagcctcacctcaccccctctgtggggacttcaggtgccttgtcttctggctgggccatcgtcaggttgcaggaagccagtgagtcatgacctggcctctggcagggagaaaggtaagactcaaagctgctctagccctcgggtcatgttcaagatatttacaatcaatatggcagagaccctgaccaatcagaatggaccccagaggccgcttgccgtggcaggggttaattctttattttatttttgagacggagtctcactgtattgcccagactgcagtgcagtggcacgatctcagctcactgcaacctccgcctcgtaggttcaagcgattcttgtgcctcagtctcccgagtagttgggattacaggcgtgcaccaccacgcctgggtaatttttgtattttttagtagagacaaggttttgacgtgttacccaggctggtctcaaactcctgacctcaagtgatccccccgcctcggcctcccaaagtgctgagattacaggcatgagccaccacacccggccggcaggggttaaatctttagtaccggatggtggggaatctggggatcccaggagagaggccagtgtgtcttgcggtgtggggagaggactcaaaacaatagctctttactgaagtggtaggaaatatgttaagatttttaacagccatgggggctgtgtaaatgtgggccagcccttggcaaaacccagtcagcgcctggaaaagttcttggcccagagtaggcagtccctatatctggaaaggtaataacatcccctcttcctcccttcccacaccatggaggggccactgaatctcttcccccagcattttattatgaaaaatttcagacatagagaaaagctgaaagaattgtacaggaaacatccctatgcccactaccaagattctaccatgaacattttactcatcttgctttatcacacatctgttcctctctctcttcatccacccatcaggccccagctcctaaccaggtacagagtcctacgtaggttatcacttagggtggcacttatcccagcagcagtcccaggagcaggagacctggatcgggggaggatccatcctccctccctccctccctcccttccttccttccttccatccatccagtatttactgaatacaggctggaattaggtgcctctgccctggagagagggtgatgaacaggacaggctcctcccctcagggccttccattcttgtttggggcaggtgtagcatatggataataggcagctaaacaaatacattaggccattgaccagaaggccagggtgttattaggaaggagggaggtgggcagggaggcgcaggtgccctgcccaggcaagagcaggaaggaagggaggggaggggaggggagagggaagcagatgcctgcttgtgtaccgtggcaggagaggaggctgtgggcagtgcgtggcaggggtgggtcagggcagctgcctcataccaaagggaggcagcaggggctgaagatgccagatgctcggttcctgggggccctacctgttctcggaggagaggcctgcagtagcaggaagtggagagaggaagctgagcaggcagggggaagaggcggggctggggtatctgaagtcaactttcctccctctttctggggcctcaggcctttagtgacggggcttagaggaagggacactggcaggctgggagtccaggggtcagagccacgagggcccccgtgaggaccctcttgttacccctcactctggatcccggagactttctggttccttagtggcccaagatctaaccccctcccttcagagatttccctgggtgcccacagaaagaaacaggaggccagaccggattgttagttgtttttgtttttaatttgtctccaataagcaatgtcttctgcccatccagcatgggaagtgggtcccacgtgaagggggcccaccacccactttgggagctgaaggcagagactcgggagccctcccggctcagactccccctacgctgggtgtgggttatattcagaggcccacacccacactggggtaggttaggtatggtttacttagccacaggcccccgggggcaggagacagagtgggggcccgaagctccctgtcctggaagagttaaaagttctggggtagccctggccccgtgggggcagttagagatgagggaggttactccttagcccaggagtggttagagacagtggggctggtagagatgcctgtttaagccttggcctctaggaggtgttagagatttgctggggttgggggccagggttgctgggaccccagttttggggagggagctgtaagagattgggggatgttctgagctccccagacaagaactgctggttaagagggggccaggcccggttggggctcagctgtccctgaggagctcggcatcccgcctgggagatgcagctgtcactggggtttctccctctctgttgtcctggcctcgtccttggcaggtggcggggacttcttgggggaagctgaagtgctggggttggggacccccgcccccgactgggcatctatgctggcgtgctccctccggacaaggtcctccagctccttctgcaggagcaaaggtcacagaagtcaaaggtcactgtgcatcatggggtcagaggacccatggggtggggagagggtccagggatggggctcaggacaggctggggttgctcagctcctcaccttccatccaaggagctcagcaagggccaggcagccctggtcgcattcacccagccaggccacgtccctgcggtgcagcaggagatcagagttcccaggcgggctcgcccctgcctgctcctctcatctgccttcgtgcccccgctcccacctcaccctgtcccttccaggctgccccaacccccggcggggcctcacctgtaggccttcttggagtcaaagtccatgcctcctccgaggcccataatcatccccaggaaagggtccgactgtcagggagggggtgggtcaggggcaggagcagggaagggagagctaagagcacagaccctggagccaggtggcctgggtttgtatcctagctctgtgactttgttttttttttgttgttgtttttttggttttttttgagacaaagtttcactcttgttgcccaggctggagtgcaatgatgtgatctcggctcactgcaacctccacctcctgggttcaagtgattctcccgcctcaacctcccgagtagcctggatgacaggtgcccagcaccatgcccggctaattttgtattattagtagagacggggtttcaccatgttggtcaggctggtctcgaactcctgacctcaggtgatccacccgcctcggcctcccaaagtgctggaattacaggcgtgagccattgcgcccagccagctcagtgactttggtcaagtgacttgtcctctctgtgtcttagtttcctgtagaataggggtgatcacaaaaccgcgatggggttgtggcgccagtgagttcacgcaggctaagacttgggacagtgtctgcccacagcgtgcgctgcttgcccggtgaccctgcctacttcccctgaggggaacacctaggagggagcacctgccctagagtgaggctgcccaggaaaaacagacctgagagacccagagcgtggacccaaccccgccccccgcactgtctctcctgacccctgcaccccctcccacctcctcagtccctggaagcccggccttcctatctggcttcagctggtttgagttggaattctatcacttgctcaaaagggcagtgaatgtcccagaggcctggaacccgacccctctggattctagagccccaggttctgagctgaggaatgcaaagtgctggggttccacagtgggggttccctctgaggaaaagggtgagagggaagggggagcctgtgacgacgggggcttgaagaagggctcttacctggccagctttctccttgttgatgagcaggcgaggggtggagaggggtgccctgtggggagggggagctaaggggtcagggtctgtcctggccctgggtgcccagccgtcctcccagccacagcccccaacctacttgctgatgagggaggcaaagggctgcacctgcaaggaggtacccatgaccaggaggaggtccaccttcaggaagtcctgcggggaggggcgtgagcttgggagcctccgcccaggctgcgccaccgctccctcccccgcccccagcagcaaacctccctgccgccccccatagctggggaggtgacctttcctgaggcagggcccaggctgcccccatggggcccagcacaggtggaggcggcggttggggatgcggggaggctggggggccacttactgactgcatacaggagaagaaacgcgctgggaggctctcaccaaaaaagacgatatctgaggtggagacagatggacggacagagacagtgacatggggaggcagagaggacaggtgggagcaatggcagacccggaggccacagtgggagttgggagcagtggggaccggccaggggcacagaccccattctccccaggatggatctggggcactgttcagagagacagaggtggccagatgtgtgcgggtgtggcctttgggagggggtcagggggaggaggggacccccacccaaatccacctgggcaggtccctggccagaggctcaccaggcttcaccaggctctgacagtcttcacacttgggcgtcacctcagagaagatcttctctgggtatggggaaggggaagaaagagaaggcagtaagaggatctgggccggagtctggaggtgcagcacccccacccctcttccactgttaacatgaacacacctccatcacttggagtgtgatgggtgtctcctgaggtgtccactctgctcagaaaagacctctcttcttgttgttgcattttttttgtttttttctttctttttttttttgagataaggtctcactctgttgcccgggctggaatgcagtggcacgatcatggcttactgtagcctcaacctcccagcttcaagtgatcctcctgcctcagcctcctgagtagctgggattacaggtgcatgccagcacgcccggctaaattttgtattttttgtagagacagggtttcgccatgttgcccaggctggtctcaaactcctgggctcaagcaaatctgcccactttggcttctcaaagagctgcaattacaggtgtgagccactgcgcccggccttattggtttgtttgtttttttgagacaggttctcactctgttgcccaggctggagtgtggtggtgcaatcatggttgagtgcagtggtgtgatcatagcttactgcaccaccgacttcccaggctcaagtgatcctcctgccttagcctcccgagtagctgggctcacaggcatccaccatcgcacctggctacattttattttttttagagatgggatctccctatgttgcccaggctgttctcaaactcctgggctcaagtgatccacccacctcgacgtccaaaagtgttgggattacaggcatgagccactgtgcctggccttatttcttattgatttaggaagcttgaaagcatttctggccgggtgtggtggctcacgcctgtaatcccagcactttgggaggctgaggcgagtggatcgtttgaggtcaggagtttgagaccagcctggccaacgtggtgaaaccccgtctctactaaaaatataaaaattagccaggggttgtagcacgtgcctgtaatcccagctacttgggaggccgaggcagggagaattgcttgaacccgggaggcggaggttgcagtgagccgagattgcaccactgcactccagcctgggtgacagagcaagactccatctcaaaaaaaaaaaaaagaaagaaagaaagcatttctgtcacttgcaacccactgaattctaagtcatttgctcaactgtccattcattcattcagcacacatttataaagcattgtttcaatgtcagtagtcggtaattttctttaaaatatttctgcatggacagcatgacaccgtgggtgctgcctgtgacgctgctgtcaatgacacataatgggggtaatgtgaattgtacactgcccccagctgcttgcagttgggctattcaggaatcctcagcccaggggcactcagctggcattttatcagaacagccacactccagaggcccttctgcaaatgctgcagctgtccttatctcacagggacaccagaggctttgttaaatcagcataaagaatgtcagaaatggctttccatgagtggaataagtgacttcttgttttttttttttttttttttttgagacagagttttgctcttgttgcccaagctggagtgcaatggtgcgaactcagctcactgcagcctccgcctcccaggttcaagcgattctcctgcctcagcctcctgagtagctgggattacaggcgcatgccaccacaccaggctaatttttttttttttgtatttctagtagaaacggggtttcaccatgttagccaggctggtcttgaactcctgacctcaggtgatctgcccgccttggcctcccaaagtgctaggattacaggtgtgagccactgctcctggcctactatcatatattaaaaacagccaaagacaggaaatcaggcagttgggctgcagtgagccatgatcacccactgaactccccgcgtgggcgacagagtgagactctgtctcaaaaacaaacaaacaaaacaaaaaaaccccaaagaattgagcaggacagaatgggtgcccactgcatggagacactgctcctggtgctgagaggaggcctgccctcaggatgccctccagcctcacctttcatccagcttagcgggtattcgtgccggcagctggcgctgacgcagtgtgatgtgtagaaggtgccgtgcgcctccaccaagtcctcctgttccagcccggctattcgctccagggtatctatgttctagagggagagatggagggaagaggggtgaggagtgagccaccccttgtaggccagaaggcacagtagggagttgagggccacgaggagcagtgaggtggtggggacaggtggagaagggagggaggagaagcaagtggcagggtttatctgaagactcttctgttcatcccaatggtgccacttaaagggtgacagtcaaggctgcttaaaggcaggggccaggctgggcatggcggctcacgcctataatcccagcactttgggaggctgaggtgggaggatcacttgaggccaggagttcaagacctgcctgagcaacatatcaagacgcttgtctctacaaaaaattaaaaaaaaaaaaaaaaaaaaaggggcccaaacctaaatatctatgaggccaggcccacagccactccacagcctgtgtggcttttattctgcaaattcaggccatttgctttcatttttcagaaaaaaaatgttgttttattagagccagatgctttatttccacctgtcattaattgctgaaattaacatacatttacaatgtctctgttattaatggagccccctcagatgtggcatccttgtgcagtgcgcaccctgcacagctgcatgtggcagctctaggcaagcattaacataaatgaatcaggagggcttactaggtgtggtttgtttgtttgtttgtttgtttgttttttgagatggagtcttgctctgtcacccaggctggagtgcagtggcacaatctcggctcactgcaacctctgactcccaggttcaagagattttcctgcctcagtctcccaagtagctgggattacaggcacgcaccaccatgactggctaatttttgtatttttagtagagatggggtttcaccatgttggctaggctggtctcgaactctggacctcgtgatttgcttgcctcggcctcccaaagtgctgggattatagacatgagccactgtgcctagccatgtttttttatgtatttgagacaaggtctcactctgtcgcccaggctatagtgcagtggtacaatcatagctcactgcagcctccaactcctgggctcaagcaatcctcccacctcagcctccacatctggctgatttttaaaattttctgtagagatggggtctcactatgttgcccaggctggtcagcgagccttctgcctcagcctcccaatgtgctgggattacagtgtgagtcatcatgcctggcccttccttggctttaatcactatcttcccctttagtagccagggtcctttcttactatggcctgtttcatagatggcatattcacctgtgttcttttctttttttggaggcagggtcttgctctgtcactcaggctggagtgtagtggtctgatcacagctcactgtagccttcacctcctgggctcaagccatcctcccacctcagcccactgagtagctgggactacaggcaaatgccaccatgcccggctaattttttatctttttaattatttttgtagagatggggggtggggtggtctccctatttgcccgggctggtcttgaactcctgggctcaagtgatcctcccacttcagcctcccaaagcgttgggattacaggcgtgagacaccatgcccagccactgttttcttttcttttcttttcttttttttttttttcagatggagtttcactcttgttgcccaggctggagtacaatggcgctatctcggctcactgcaaccactgcctcctgagttcaagcaattctccctgcctccgcctctcaagtagctgagattacaggcacccgccaccatgcgtggctatttttttttttttttttgagacggagtcttgctctgttgccaggctggagtgcagtggcgcaatcttggctcactgcaagctccgcctcccaggttcaagtgattctcctgcctcagccttccaggtagctgggaacacaggcacgcgccaccatgcctagctaatttttgtatttttagtagagacggggtttcaccatgttggtcaggatggtctcgatctcctgacctcgtgatctgcccacctcagcctcccaaagtgctgggattacaggtgtgagccactgcgcccggccactgttttcttttaagacagtgagactttccatattaaacaggtgggaatgttcttttctgcacagacatttgtgcgcgctcatttttcttaaaacaaccaccccctttggagcagctgttgtttgcctgtgaggaatgccgctaaaacaggtgctgacagaggacactggcagaggttacgcagagatggctcgcatgtgtggcccagggccaaactgacagcgtttcccagggactccagaaacaacgggaagggtttgtttcccttcaagggcagaaagaatgctctaactgccttctgggctccctaccagcaaccaccttatctccaaagcctacagacaagagtcactgtcactgttcccacacgccctgtaactttcctcccttgcccactattctaaatcttggttttgcctttggtacttgactcagtctacccactgactccctcacatgtgagtgagcaatttgcaaataactgaacagtaagcaaataactgaacagcgtggaaaagaaccaccgaaatacctctgcgttctgttattctttgacaacatggtttttttttttttttcttttgacaggattttgctctactggtccaggctggagtacagtagcttgatcatagctcactgtagccttgaaatcctgggctcaagcaatcctcctctctcaagctcccaagtagctgggactacaggtgtgcactaccatgcctggctaatttttttttttttttttttgagatggagtcttgctctgttgcccaggttggagtgcaatggcggaatcttggctcactgcaacctctgcctcccaggtttaagtgattctcctgcctcagcatcctgagtagctgggattacaggcacgcaccaccacacccagctaatttttgtatttttagtagagacagggtttcaccatgttggccaggctggtcttaaactcctgacgttgactttggcctcccaaagtgctgggattacagacgtgagccaccgcgcctggcctttatataatagtttgtatgtgatgtgtcattttttttctttttttgagacggagtctctctctgtcacccaggctggagtgcagtggggcaatctcagctcagggcaacctccacctcccaggttcaagcaactctcatgcctcagcctcctgagtaactaggactacaggcatgtgccaccacgcctggctaatttttgtatttttcgtagagatggggtttacaacagcaccccctttcccgaacacatacaccgtttctgactccccttccagcttaactgtgttccagggacccatgaccatcttatatgctcagtatatggtgtctccatcttgtccatcatctccctccctgctgtagggaatcaactcagtgaacatttactttgacagaagctgacaaacaagggccagcggggtcttggggtgagtgtcatgacatcaaccacaaaaagcacttggcttcaagcaagctgttatcatatctgagccacgtcctggaataatggtgactctctgggcagaaggtttattctgagcccggagtctccctatgttgcccaggctggtcttgaactcatgggctcaagcgatctcccactttggcctcccaaagtgtggggatcacaggactcctcctcttggaagaaggaggcctccgctgccctctgcctcctaccagccccaggtgggaacacctcgcccacctgagaaatctgaacttaaagccagttgttcctccccctggcggtagcttttggggctgcaggtgccaaactgcaggtacagggagaaaacactagaacacttatttattttcaatgttaccactcttttttgtttgtttgtttgtttttttaaattgagatggagtcttgctctgtcacccaggctggagtgcagtggcacaatcttgactcactacaacctctgcctcccaggttcaagcgattctcctgcctcagcctcccgagtagctggggttacaggcaccaccacacctggctaatttttgtatttttagtagagaccagatttcatgatgttggacaggctggtcttgaactcctgacctcgtgatctgcccacctcggtgtcccaaagtgctgggattacaggcgtgagccaccgcgcccggccacctgttttataattcggggttctgaggtgtgatctagagcttgaattaatactgttgtagtgcatcatgtcatttctatacatattcataaaacaggtagaggcagcaacattttgttgttgttttgatttgttttttgtttctttgaaaccaggtctcccaggctacagtacagtggcaccatcatagctcactgcagtcttgacttcctgaactcaagcaatccccctacctcagcctcctgagtagctggggctacaggcacacgccaccctgcccagctaatttttgtatttcttgtagagacagggtctccctatgttgcccaggcgggtcccaaacgcctgggctcgagctatctctcgctttggcctcccaaagtgctgggattacaggtgtgagccactgtgcccagcccatcaagatttttttactgttaggggtgtgagactctccaaaccagaagccaacaatgtgagccatccttgcttgaatgccccagggagaggcccttggctaagcacctgacgtgtacgagacatgtttataattgggcaaagcacaaaaaactataaaaaggtgccccttccttaaggcacaacatctacttgttggacacgtgtcatagtgtatggattttgttagatgaagtcactttggaaactcgctcataaccaatgtgaaatctggggtgcctatagtgcacacagagtcccttcagccataggctccttccacatcacacatgggatggccctgagaggaggtcactgccaccgcactgcagacctgagagggcagacctgagagggcaaaccttttctggcccctgtttgacggaaggggaaactgaggcagagaagacgtgactcacggcaggtcatgcagcaaggaggcagtaggccaagccctggccccgcattgctggagtccccgcctgagctcttgggcacgcagctctgctcctctgctgaggacaccatgcccgttccacccgcccatcctcctcccaggatgctcgcatccgcctacctgcgtgtagcagcgcaggagtagccccttgtccttcagcaggcgcatgaagtagtgacagatggttggctgcagggaagagcgacagcactgctgacgactgcagggaacagccacaggccactgccgcatgccaggaactgttctaggcactgtgactgttttacccccagggaaccgtcacagcagccgcgtcggggagagaccactgctatccccagatcacagatgaggaaactgaaggacagggaaggggattgtgttgccaaagtcacacggtgggtaagctgcagagctgagattcacacccaggcagcccggctgcagggtcccgggctctcaacggcatcattagtcagctaagcctcgcagcagccctcttcagacagtaccattagcttcacttcacaggaggcaaatcggaggctcaaggtcgtaagatgaagacacgaggaaccaggacttgaaccgaggcagtctgggcccagcacccatgtacttaatggctacataatatttgtctgcagggccttggcggggcttctcatgcgtgccctcccccaacccttcctgtttcgccccctgcaaaacaaagatctcaccttgaactgcccaggatagagttccttggcgagggcgaagaagggttccggatgtttctgtaggagagacagccagagggccagatgccccaggtagcgtgagggttggagccaggtgaccccatccccacccctcacagacgccccttcctgggggagcacaaaccttgaaatagctgatctcaaagatggcctctgggtagggaagatggtacttctctaggttgtcatagaggccggtggatggagagcgaaagtcggggatgcctgcggctaggaaaggggggtcagggagcagttggtctataccatactaaccctcccaggacagggctcagatagggctcctccccagcccttgggagggactccccagttcctgggggtagctgctgggggagaagggttacttacatgtggagattccagctcccaccaaacagatgactctgcgacctggaggagaggaacttatgcaccatatgacaccgtttgctcagtccctacgatagcaccacccatcacagcccctgacatcgtttactccatgccaggccctggggcaagcatctcagatgcatgacgggccttccaatcatctagacggggatggtgttaacatccccattttataaatgagaaaactggggctcagataggggaagaagtcacacaatcaactgcggaagagccagccagcggataaagaatccagtgttgggctgggtgcagtggctcatgcctgtaatcccagaactttgggaggctgaggcaggcgggtcatctgaggtcaagagtttgagcccagcctggccaacatggcaaaacctcatctctactgaaaatacaaaattagccaggcgtggtggcacgtgcctgtaatctcagctacttgggaggctgaggcaggagaatcacttgaacccgggaggcggaggttgcagtgagccgagatcatgccattgcactctagcctgggtgacagagcgagactccatctcaaaaaaaggaaaaaaaaaaaaaaaagagaatccactgttggaaatcacaccaacttggacttgagaaaaggccactttaggataagaaccctgggctgagcagaaatagctagctggtggctggtgagtagccaccaggccatagtaccctggcatctgcccatcagctgatagacaggcacaagtgtgatatgctgtggatcagatgcctctgggatgccctgtccaagggaggacagcaaaggtgaacagagcacaaagcctgccacagcttcagccctgagcttcagctctgagatgccatcaggccaggcctggttgaatccagtggtggctacatgtggtctggattcaggggacctggggtcaaatcctggctctgccacttggcaactgtttgaccctacactgagtcgtgacctttttgtgcctccttttcctcctctgttcagatcacttccataatgatcttacaggtataatgtgaatatcaaataatagggcacttgtaaagtgctgagcccagtgcctggcaaatagtgaagcctcaattaagtggttaaaaagaaatttttagggccgggcccggtggctcactcctgtaatcccagcactttgggaggccgaggggggcagatcacctgaggtcaggagttcaagaccagcctggctaacatggtgaaaccccgtctctactaaaagtacaaaaattagccgggcgtggtggcacgcgcctgtaatcccagctactcgggaggctgaagcaggagaatcgcttgaacccgggaggcagaggttgcagtgagccatgatagcgccactgcactccagcctgggtaacagagtgagactctgtctcaaaataataataataataaatttttagagcagtgaggtgagggttggagcctcacctttaaatttttgcagagagggggtctcgcttattgcccaggctagtcttgacctactggcctcaagcgatcctcctgctttcagcctcccaaaatggtgggattataggcctgaaccaccactcccggcctcaactaattgttatttttcattactatctcctcctgggcaccctcatgagccaattaccccagaatccaggtgcaggaggacacaaggaacaaatgctttgtagccactgcctgtgttgtctttggggcctgcccaggctaaaagatggctgcagacagctgctcgcctgccgcaggagagggaggctcagggcagcaggcctggctgcctgaggagggagacagtggcagctggaggacagggacacaggagaagatgtcctcaacaaaaggctgctcaggaaccacaaagggtcgattgttctagttgaggactgccaagggcctggtttctcagactttggtgacctcaacttgtggcaagaaatataaatttcaggccgggacgggtggttcatgcctctaatcctagcactttgggaggccgaggagggtggattgcctgagctcaggtgttcaagaccagcctgggcaacatggtgaaaccctgtctctactaaaatacaaaaaattagccagtcgtggtggtgtgcgtctgtaatcccagccactcgggaggctgaggcaggagaattgctggaacccgggaggtggaggttgcagtgagctgagattgtgccactgcactccagcctgggcaacagagcaagactccatctcaaaaaaaaaaaaagaaaaagaaatataaatttcatgctgactcagtaagtggacacctatccaccacatctgaaataagcctcctgtagtaataaccacggcacaccctgccacagctctcgctatgttccaggccctgctctaagcatttgcatttttatttatcttttaaattttattactttatttttttttagagtcagagtctcactgtgttgcccaggctgcagtgcagtggtgccatcatagctcactgcagcctccaattcctgggctcaaacaatcctcccttctcagcctcctgagtaactgagactacaggcaacgcccccatatctgactatttttttttttcttgtagagatggcgggggggtctcactatgttgcccaggctggtcttgaacgcctggcgttgagtgatcctcccacgatggcctcccaaagtgctgagattacatacatgagccactgcccctggtcctatattaatttatttagccccgccaataaccttatgagttagatactataatcattatcctcattttatgaaacaggcctggtcaatcagagtgcagtaattcactcagcaatggagaagcgacccaggtctggccaatcagaggcatgggggcaggcatttgactcaaccgggaccaatgggagccaatctctgctgtttggtttgaactactgggaaaaggtgctctctcggtggcagctcctaggctagtggaacctgcatttgcagctgccaggagttacctttaccccaaaacaagaaaagcagcatcagagagagttatgatttttaacaaagtggaagcacctggacccagccgtgcttcaagctggattagagccaacacactcctttttggcttaagccagttccagctgggtttcttgctacttataaagaaaaggtttcaataaatggttcaagtggctggggatgggaggtcacttggggccaggagccaggcaaagtggcccaatcctgacaggggactcacagcgttcgctctgcatgtaccgggccaccccttccaaggtcagctcgtccagcagacgctccttctggctgcccaggctgagcgtctgggagaataagttccgcaggaagtccactgaccggaaagaagagagacagcggcaggacgggcattcagccaggggcatggatgtctccggcaccctggccccagccctggggttcccggcctccccacatctaaaggcacaaggcccggcccagccagcggcctccaggagcctgctctggcactggtacccaacccactgctacatactttggatgtcactcctgatggagttgaggaggtatcacccacacccctgccctgaaatccccccgccccccagaaccctgctccctgtccctccaggaagatactcactgtctgcttctccaccagcggctcctccctcagagtctgaatctgagtcctggaaggggtggggtggagtggccaggcccgagaggtgggattagggagggaggagagggggtgataccaggtttggggaaaaggctgtggcaggaaggtggcctgaggaagtgcggggtggtggagagactgcactggggctagctccagggctctgggacaggctgccggggttggagtcctggccatgcccgtccccaggagcaagacctcatgtgagtggctttgctttgcttttcttttttgagacagtgtctcgctctgttgcccaggctggagtgcactggtgcagtcacagcttgctgcagcctcaacctcccaagctcaagggatcctcccacctcagcctcccaagtagctgggaccacaggcacgtgccaccatgccaggctcattttttgtttgtttgtttgtttgctttgtagagacgaggtcttcctctgttgcccagggtggtcttgaactcctgggctcaagcaagtctcctgcctcggcctcccaaagtgctgggattacaggcgtgagccactgtgcctggtcgtgactttgattttctaagtcttggtgtccctcaccttggaaagggagcttgggtgctgggcgcagcaccaggggcgggggaagtgcttggtaagcgctggctgttgctgttattatcacagcctggggtcttcccttcgttcccgggtcccctggagcgtgggcctgctgtcccttcccagcagccctgggggcctctgaataatgtcccaagtcactctgggaatgattccaatgcaaagccttggccctcacttcaaggacctatgtgccccctgctcgaggcctcagacactctgcccacctctccagcaacctctgtctccttcctcgaagcctcccctcagcccagctccagactggcaggtctctgggactctgtccagggcctctctgctttctctttccactttcctggggttacctgtctcatccatgccaatgacctctgcctcgtcactcatgataccatctctctgccctcagatccggggttccctggcttcctggacaccttgccctaggtgccccccagcctctcactcctactatgtcccaaatggaccctggcatctcctccaagcccatcctcctcccaggcctcatctcaatgcgatcgtactgtcccccccatcagccagatgtttcctgcccccgcctccctcctcgccctcctgccacagcccttcagctccagagcatgtacgctgagcctcctaagggtctgtccaccaaccccctttccctccccggcgctccacctggtccagcctgtcctctcctccgggggtcctgccccagcctcctcccccagcctcccagcctcagtctccacctcccatccaccctgctgccctgcatgtgaggctgtctgggtcagctcgcccctctccacttcaaaggcccttctctctggcttctgcagtcttcccagacatctatggaattgccaggatgtccacaagggcagggactttgtctgggtgcccagcactgagaacagggtctggctcctggcaggagctccaggagctcctctaccttggaatgaatgcctgcttcaggctggaccacggctgggccctgcaatggatttcaccaaaatgcagttctgaccaagccaccacctcagacaactcccttccccggatactcactgctctgcgtccaagtctttttgaataagaccctcccttccgaacatacgacaatttaaaaaattgctttttaagactgtgcaactccggctgggcgtggtggctcatgcctgtaatcccaccactttgggaggctgaggcaggaaggttgcttgatgccaggagttcaagaccagcctgggcaacacagtgagactctgtctctatttaaaaagagagagaaaggctgagcacggtggctcacgcctgtaatcccaacactttgggaggctgaggtgggtggatcacgaggtcaggagatcgagaccatcctggccaacatgatgaaaccccgtgtctaataaaaatacaaaaaattagccaggcatggtggcacgtgtctgtagtcccagctattcaggaggctgaggcaggagaatcgcttgaacctgggaggtggaggttgcagtcagcgagatcaccccactgcactccagcctgggtgacagagcgagactccgtctcaaaaaaaaagagagagagaaagagagagtgagaatgagagagagagagagacagagagaaagagagattggacaacctctgcaaaaaccttgattatactcatgtatacttcaacaacatataacttgcggcactcaccttgtaattgcccaagcccacccttataaagataaccactgttagctaagcttaatggaaattactccagttttctctgcataaaactaatattttttacagaaataggtcatagtacaatacaacatcttgagttttcggcagaacaatatgctacagacccacctaatttaaaaaataattttttaaaaaagagacggcatcttgctatgttgcccaggctggtctcaaaactcctgggctcaagtgatccccctgcctcccaaagtgctgggattacaggtgtgagccaccgtgcccggcctcacctcgtttttcagagcagctacatagtattggattgtatggatgaaccatagttcatttaacccatccactgacagccatttggactgtttccagttttgccctgtgacggacaatgctgcattttacatcctcgcctctctctctttgggactgaggatcctttttaacattcaacctttttctctgacagtggtcgtgctttgggagccaggcgagtgagttgccacagcctaacaggaggctcttatatccttagcaaagctccactgtgcatttgtgaggtattctgatgcccgcttctgcaccaccccacgtctgaaaggcaatctcaggggtgtgggtgggctggcactctttcaggctgtacacagtgaggctgtgtggaaggcctgtgcccagcatgtgtctgcagcttggcctaagggagagccggaggtgctgacgggggccttcaagctcctatgagactgcctgtccacctctcctggcagcctctgacaggtggcgtgcccagtgctgggggactcaaacccttccctgctcctgtagccgagggacgggggataagtgacttaacaactctgcctcagattctgcatctgtaaaatggccgtgataggcgtttctcttcacagggatgccaggaagatgaaattgagatgaggcacgtttggcactaaacagtgggcccagctttagtaagccgtcagtaaatgctaaccacgactataacaagctgaccaccaccagccacccaattatggaacacatcacaccccttcatgccccccaggtctttgcacaagcgatacctgttgtgtggatcaccatttctcaccttgtctaagaaaattctaagtcactcttcacttatgctgtgtctgtatcttggtctgacagctagaccagcctgtggattcctccagggaatggcctggctagaatcttctttgacccagaaaattttctctgtgctcccacagtaccctgagtttctttacttttcttcctttttttttttttgagaccgtgttttgctctgtcgccccggttggggtgcagtggcacagtcaaggcacactacggccttaacctcctgggcttaagcaatcctcccccaactcagcctcctgagtagctggcaatgcaggcatgcaccactacacatggctaatttttaaatattttgtagaggtgggggcctccctatgttgccaagactggtctggaactcctgggctcaagcgatcctcctacctcagcctcccaaagtactgggattacaagcatgagccactgtgtctggccctgagttactttctttcttttttactttttagagaaagggtcttgctctttcaccccggctggagtgcagtgatgcaatcatagctcactgcagcctcaaactcctgggctcaagcgatcctcgcgcctcagtctcctgagttattggaattacaggcataagccactgcatctggccccctgagttactttcgtcatcacgctgtgagatcattttttcccatcacttgtccacgagatctgtgcgttccaagaccaaatgggatacctgtctcttccagtcccaggacaaatgtggttcagaagggatggcaggcagtggcaaggaagaaggaaagtttgggaggacaggcctggacttgaggctggaaactcttctctgacaatccccagaatctgcctttccccagaaagctgcactgggtggtgtgagggattggggcaatgagccgagggccctggggtgactgtttcccctttgccacctccccccagtgtgggatgtggaacaagtccgtctctctcctcccctccaccctttcccccatctcacctgagcctcctgcaccttccctgcctgggtctccagagggtgagaggctgggggaggggagcagaggtggttacagtggggagaacgattaaggggggaataaaggggttcaaatggtcagtgagggggcaagaacacccaccaacctagttacactgggatgggatggtggtaaaaatggagcagagggagggaggggacggagaaaagatcttatctacatgcaaagtgatgccgggagaggtgattagtgaggggcagagaggctggagaggaagatttagggggacagggagaaagtaggggcttttgcccaggctggtcttgaactcctgggctcaagcgatccaaccaccttggcctcccaaagtactgggattacaagcatgagccattgtttctggccctgacttactttctttcttttttactttttagagaaagggtctcgctcatgtcacccaggttggagtgcaatagtgcgatcatagctcactgcagcctcaaattcctgggctcaagcgatcctcctcctcctacctaggggattcagggcatgaaggaacactcaggaggagttaggaaggacacgacagtgtgtgagtgtgtgtgcggggagggttagatttacaaggcagagggaagtttagaaaggaaaagagaagggaagagacgctttggctgggaggcaggtttaggagggaggtgcagtggtgcagtggaggcggtaggtttaggagaggcgcggaacaaggggaagccataggaggggtcagcaggggtccctcagcatcctctggttgcctctaacaatcaggtacccatagcaagcgggaccggggcaacttatgttctttgcagcgagggaccttagcaaccaaggtgcgagaaacacgcgatcattggcaacttggcaagtggatgtggtaaacgaaccctgaacacactgcgacccagaaacccaccagcctagcgatacagatcgctaagcaacagccctcagaatcccactccccgaagcgctccctacttcccgccccaccgcggccacccttgggccccggggcctgcagcattcagccaggccccggcgcggcccgaccctcctacccggatccccgactcacggtctggctctgccatgggcgcggtgctgaagcccttgaggctgtcaccgaccgctctgtcccgtcaccaaccactgtgtcccgtcaccgactgctctgtcctgtcaccgactgctctgtcccgtgacggcaccagaaatgggagtggccgtgatagggcacagaactacaactctcagcagacattgcggccgcagacgcgctttcgtacaacacccagagcgccccagttaggtaagaaagcgcgcgaggaccggactacgagtcccagaaggcgtggcgtcagcagccatgttggtaaagggcgcccggaaaatgtgggaacggctagagagttgtagtcctcccgaatactctgattggtcaggatgcagtacgagggcggggtgtgagcgattcagcatattatcattgggtgaatcagggggcgtggtggggaatttcccgcagggcggaagctccagaactcccggcaaagcccagctacaggcgggcgactgcggggggcccctgaggcggcgggggccatggctggggtcgcgtgcttgggaaaagctgccgacgcagatgaatggtgcgacagcggcctgggctccctgggtccggacgcagcggcccccggaggacctgggttgggcgcggagttgggcccggggctgtcgtgggctcccctcgtcttcggctacgtcactgaggatggggacacgtgagtgaaccttaggctgccaaacggagccctaggacccggcgtcacattcctcattaatctctgatccctgaggcttcctaacctcatactcctaaatctgacttccgatgctgaacttcctgacctctaacccccgagtcctaacttttaacaaaaccaatcttctatctagctatgatcctaacccaatcatttcttaccttcttttcttgaactatgattctcagctcctggaatccacattgtatccactgatacccaaacctgactccagtcctgagacttctgttagaactgtggcttctcctgacttctaacctccaaatatgatctttgattcttagttcccgatttgagccctagagtttgatttccgaaattaatacttggtccctgactctaagatcctgtcttctgagcagtgttcttcaaatcttaaattcaaagagagagaatgtaagctcttctatgttgaattcctaattaaagtaaaaaaataggaaaattaaaaaaaagaatgttagctccatgagaccaaggattcatctgttaaacaaatattctttacacattaccacgttccaggctccgtttaggtgctagtgataaaggcagtgaagaaaacaaacaaaaacttaagcccttgtggagcatacattttagtggagctaaataaacagattgataagaccacaaggaaggaaagaaatggaaagacaggaagaaacaaagaaagacacgcagaaagaaagaaacatagaaagtaagaaaaggaaataaagtcagaggtagttaagtactttggagaaaaataaagcaggaaaatgaggcaatagataaacaagataagagcatttcaaggagaaggaactgcagttgcaaaggcccagatgagggattgtactgggttttttgtctgttgtgtttactgctgtatgcccagtgatgcaagcagggcctgatccaggaggcactgaatattgatctcaaccagctttatagtctcgttaattttcattaaatttcattaattaattttggtttcattaatttttttttactttctattcaattggtctctgttctgacttttttttttgaaacgaagtctcactctgtcgcccaggctggagtgcagtggcatgatcatggcttactatagccacaacctcctggctcaagtgatccttgcacctcagcctcctgagtagctgggaccacaggcacatgccaccatgcctggcaaatttttaaatttttttgtccccctatgttctcaaactctttttttttttttgagacagagtcttgttctgtcacccaggctggagtatagtggcactatctctgctcgctgaaacctctgactcctgggtttaagcagttctactgcctcagcctcccaaatttgggattacaggcacgtgcccccacacctggctaatttttgtatttttagtagcaacagcagtttcaccatgttggccaggctggtctcaaactcctgacctcaggtgatccacccgctgtggcctctcagagtgctgggattacaggtgtgagccactgtgtgcagctgtggtctcaaactcttgagctcaagcattcttcccaccttggcctcccaaagtgctgggttacagggatgaaccactgtgcccagacagtctctgccttttaattagtgtttagaccatttacatttaatttgatattgatatgattgtgtaaatttatcccatgtctattatatatattctacttacctatgttttctttttcctccctcctttttgccttttattgggtatagtttttgttacttttttttcaatcctgctccttctgtatagtgtttttcattttatttctttttttttttttgagatggagtctcgctctgtcacccaggctggagtgcagtggtgcaatctcggctcactgcaagctccgcctcccaggttcatgccattctcctgcctcagcctcccgagtagctgggactacaggcacctgccacttcgcctggctaattttttttgtatttttagtagagacggggtttcaccgtggtcttgatctcctgaccttgtgatccgcccgcctcggcttcccaaagtgctgggattacaggcgtgagccaccgcgcccggcctcattttatttcttttgtttgcttattagatattcctctttttgttatgttagtggttgctttaaggtgggggttggcaaactatggcctccaggcaaaatctagccagccatctgcttttgtatggttgtgagctaagaatggtctttacatttttaaacagtttctaaaaatcaaaagaataataatattatatggcttttgtatggttgtgagctaagaatggtctttacatttttaaacagtttctaaaaatcaaaagaataataatattatatggcaagtgaaagtgtatgaaattcatatttcaagctccataaataaagttcttttggaacgcaagcaagctcactcatttacatattgtcagtggctgcttttgcactgacacagcagagtcgagtagtcaaaagaaactgtatggctgctgggctcagtggctcatgcctgtaatcccagcactttgggagccaaggcggacagatcacaaggtcaggagatcgagaccatcctggctaacatggtgaaaccttgtctctactaaaaatacaaaaagttagctggcagtggtggcgagcgcctgtaatcccagctacttgagaggcaggagaatcgcttgaacccgggaggcggaggttgcagtgagctgagatcacgccactgcactccagcctgggcagcagaacgagactccatctcaaaaaaacaaaacaaacaaacaaaaaaagaaaaagaaaaacaaaaccaaaaagagaaaccatatgacctacaaagactaaaatagttatctggctccttacagaaaaagtttgctgactcctgctgtagggttgatagtttacaactttaggttatcatgggctaccttaaagtgatattatgccatttcacatagagtaaaagaaatttattttattttattattattatttgagacggagtctcactctgttgcccaggctggagtgcagtggcacgatctcagctcactgcaacctccatttctcaggttcaaatgattgtcctgcctcagcctcctgtgtaggtgggattacaggcgcatgccaccatgcctggctaaattttttttgtattttttgtagagacagggtctcatcgtgttggccaggttggtctcaaactcctgacctcaagtgatctgcccgccttggcctcccaaagtgccaggattacaggtgtgggccaccgtgcccagcataatgaactgttttaatattcttgtttgcaaattctaacatctctgtcatttctgggtcagtttcaattcactgatggttcctattatggatcatgttttcctgcttctttacatgcctgataatctttggttaggtgccagacattgtgaattttgccttgttagtctggagaattctgtattcctataaatattcttgaggccgggcgccgtggctcacacctgtaatcccagcactttgggaggccaaggcgggtggatcacgaggtcaggagttcaagatcagcctggccaacatggtgaaaccctgtctgtactaaaaactgcaaaaattagccaggtgtggtggcacgcacctgtggttccggctactcgggaggctgaggcagaagaatcgcttgaacccaggaggtggaggttgcagtgagccacgatcgtgtcactgcgctccagcctgggcgacagggcaagactctctctcaaaaaataaaaattaaaataaataaataaataaataaataaataaatattcttgaatattattctgggatggagttaaattactcggaagtagtttgagtctttccagttttgcttttatgatttgttaggtgggtgttgagcagtgccccatctacagttaattattccccactattgaggcaagaccttcctgagtatcccacccgatagcctgtgatgatgtttttccagcctggctggtgggaacactcactattcctggccctgtgtgagtaacgagcacttttctgaaatccttttggatggttttcccatccccacagactcacaggcatggctgatccgtattctccggaatacacaagagaacctcctgcagttccccagcaatctctcctttggcaactctgttttgtactctgtcctgtgactctagccacgctggcctccacagactcttcctccatatccatctcctgacctcagacaacctgatgcgctctgcttggattcccctctctgcaccgtggctttgaaactctctcaagacaataagctgtggcagtcaagtgtggggcccacctcgtgtttcctgtctttcaggggtcactgtgattcattgcacgatgtccagtgtcttcaacactgttgcttcatataccgtatttcgtctgactcttgtttgtttgtttgtttgtttcacgtgggagtgaattctggtccatgttacttcattttgggcagaagtggaaatcccactgaataaacattgattccacgaatttgctgatgaaactctgacctctgacctcccagatagctgacagggggttccagaactgtggtcacaaggcctagcatacagtaggcgccccatgtttgttcaatgaaggaatgcaagaggacttgaactttgccctctcaccccggtctttgtccccagggcactgcacttggctgtgattcatcagcatgaacccttcctggattttcttctaggcttctcggccggcactgagtacatggacctgcagaatgacctaggccaggtgagccacgagggatggtgtagggcttggggtccagggttcccagtgtgactccctaccgcctgtcctctgcttctgcagacagccctgcacctggcagccatcctgggggagacatccacggtggagaagctgtacgcagcaggcgccgggctgtgtgtggcggagcgtaggggccacacggcgctgcacctggcctgccgtgtgggggcacacgcctgtgcccgtgccctgcttcagccccgcccccggcgccccagggaagcccccgacacctacctcgctcagggccctgaccgtactcccgacaccaaccatacccctgtcgccttgtaccccgattccgacttggagaaggaagaagaggagagtgaggaggactggaagctgcagctggaggctgaaaactacgagggtgagggtcgtcaccagggaaggactcagctcctgggctaggcgagagcacctggccctgggctcagcttccctgatttgagactgagctccttgggaaatcatgcctaggcttcaggagcccacacatcgggaccagggacctccactcagggcccagatgattgagaattggatatgtaggacccaggacccccacctggaggccccaggtcacttgggatgcagacctgtcacccacagacccagagctgccaggatccagttgtcgggcccccgggctccccacctgcagagtgtattgcagacccctaccctacccaggaccggggaatgcagagctcaggccctctgtgaaactctggcaccccaggctcccagcaatgggcagcagggttcagagacagccctcctcagcctcatgggaagaagggctcatctgcccacagccctgacatccaagtttctgctcccctgcctataagcccagccacctgagaccagacccctcctcagatggactgacgtcattcaggacccagtgttcagggcctgcctctcgcccccaggtcacaggcttttcagctacttggtaccttttttttttttttttttttttttgagacagtctcactctgttgccaggttggagttcagtggcgtgatcttggctcactgcaacctccacctcccaggttcaggtgattctcctgcctcagcctcccgagtagctgggattacagggattacaggcacatgctaccatgcccagcttatttttgtatttttagtagagacggggttttaccatgttgaccaggctggtcttgaactcctggcctggccttaggtgatctgcccgccatggcctcccaaagtgctgggattacaggtgtgagccaccgtgcctgggcaggaaccttaatttaaggtttttttttttttttttttttgacatggagtctcactctgttgcccaggctggagtgcagtggcgccatctcagctcactgcaagctccgcctcctgggttcacaccattctcctgcctcagcctcccgagtagctgggactacaggcgcccgccaccatgcccagctaattttttgtatttttagtagagatggggtttcaccatgttagccaggatggtctcgatctcctgacctcgtgatccacccgcctcagcctcccaaagtgctgggattacaggcgtgagccactgtgcctggcctttattttttatttttagtagagacgtcttgccatgttgcccaggcagcttcttgaactcctgagctcaagtgatcctcttgctttggcctcccaaagtgctgggattacaggtgtgaaatagcgtgccagctcaggtcctttgagtgataagagcagagacttgggtctcctcctggccccaaaatccaggctccctgtccacagaccccaggctgtttacccgcgggccccaggcttcaaacaactcaggcactagcacttgccagcaagctcaggccatctgagataggcatttggtacccaggtacctctttgccatacccaagaattcaggaaccagcccccaaacctaatcaccctcacgccacatgaccctcccccaggatcaaagcacggtggggtggggggggccctcacctcatcatctgacgccaatcactctgtccccaggccacaccccactccacgtggccgttatccacaaagatgtggagatggtccggctgctccgagatgctggagctgaccttgacaaaccggtgagccccaacctcggggaagatgccgtcggcgggagggggcttgtcccctcttcgggccctctgacctttctgttgcacccccacaggagcccacgtgcggccggagcccccttcatttggcagtggaggcccaggcagccgatgtgctggagcttctcctgagggcaggcgcgaaccctgctgcccgcatgtacggtggccgcaccccactcggcagtgccatgctccggcccaaccccatcctcgcccgcctcctccgtgcacacggagcccctgagcccgagggcgaggacgagaaatccggcccctgcagcagcagtagcgacagcgacagcggagacgagggcgtgagtcaggaggagagacagggcagcccagctggggggtcaggatagaccggcaggcaagaagcccaagaagataattaggcaccgaccttgggctgctgttagagaactcaggcagcagcgccagtgacacggggcactagtcaggagagacctggacaggggtggtgggaagagcttgggcagaagtggctgaaaaactaaggcagtggcaaaggtagaactcaggcaggggtggagaaaaggcgttggtcgcagtgattggtgaacacagcgggggtgggtggtagcgctgggggtgattttaggcagcaagaattggagaactcacactgcgaaaagaaaaccttgggtggcagtgatttgaacaccggcagtgctggggcaggacccgagccagcggtggggagagatatagtcagagaacccagcaatacagatccgtccttgggcaaggcgcggtgctggatgatgggtgcggaggaatttgggtaaaggcagagggaaggggtggaggagggccagctcagttgccgaaactctggagtggcggctggctagaaattggtctgtagaaatgaccttgaaaatggagttctggccaggtgcggtggctcacgcctgtaatcccagcactttgggaggccgaggcaggcagatcacgaggtcaggagttcgagaccagcctggccaacatggcaagaccctgtctctactaaaaatacaaaaattagctgggcgtggtggcgcatgcctataatcccagctacttgggaggctgaggtaggagaattgcttgaacctgggaggtggaggttgcagtgaacctagatcacgccactgcattccagcctgggcaacagagcgagactccatcttaaaaaaaaaaaaaaaaaaaagaaagaaaagaaaatggagttctgagagctaggaaactgggaggttgagccaggagcaggggaacttgggctttgaggcgagacctaattcttagggtgctctatgaggacatgggtggtgggcaaagtgacagccgcctgagcccctctgcctggtcccctttgcccccaggatgaatacgacgacattgtggttcacagcagccgcagccaaacccggctgcctcccaccccagcctcaaaacctcttcctgacgacccccgccccgtgtgatttgtttcattgttaatataatttccagtttaataaacaaaaccctagttctgacaaccagagaccagactgatcttgtcttcccagtcctccgggtccttctggggcccatccctgtcacatcaagtgctgctcacggaggcagggtgcgtttctttgtgctttattcactcagaagggttggagtgggagtgcataggtgtgggggtgcttcctgtgtcagggctgagcccagcccccggcccagctcagactcacctccttgggtgtggttccaaggcacgtccgcctcctcccctgtttgggtaggggtggcgtggggtgctaggtgaggtggaggcttcggggtcaacagtcctaagccacagggtgtgtcaggaggaaggagggactgaggtaggggtcagccctccctcctgagctgctcccccagcgtctctgtcaccttcttcagttcgtctctcaagtgctccagctgctccacctccttttcctggtggggtcagaaacggggtagtcagcacccaccttcaaaggcaggccacctcggtcactgtgattgtgggccatgtcggttctcatagtggcatccagcagcggtcgttctgatcgtcgtggaccgcgatggtgaccatgctgattgccataaccccggaagagtggtgctggctaacgcgaccacagccaacagcagtagcttggcactggcaaaggtgcctgggatgagcacctcgtgatggcgctttatttttatttttaagatggagtctcgctctgtcacccaggctggggtacagtggcacgatctcggctcactgtaacctccacctcccgagttcaagtgattctcctgcttcagcctcccgagtagctgggattacaggcatgcaacaccatgcctggctgattttttgtatttttagtagagacagggtttcaccatgttggccaggctggtctcgaactcctgacctcaggtaatcctcccgcctcagcctcccaaagtgctgggattacaggcacgaaccaccatgcccagccattttttttttttttttttaagatggttttgctctgtggcccaggcgggactgctgtggcacaatcatgactcaatgcagcctcaaactcccgggttcaagcaatcccaccacctcagcctcctgagagctgggaccacaggcgtgcgccaccattgctggctaattttttaaattatttgtagagtcacggtttcactatgttgcccacgctggtctcaaactcctggcctcaagggattctcccaccttggcctctgaaaggattaaccctccctaggattacaggtgtgagccaccatgcccaccctgttacggcacttttggtgccaccaatcatggtgacatcttgttttccatgacccagcaatggtgtctgtctgtcacctagtgaagtaggcacagcagccacttttcacagtggccaacttgctagtgatggtggcttgcttctgtgcaatggtgccatcttggttgctgtagtccatacagtagtgtggaagtataaggtaaaggccttgcacggaagttgttagccagtcgtggtgtcagtcttggccactgtgatccactagtgatggatctggtggtgcagggccaacaccggtggctgtgagttgtgactccactgaccatcatcaaccctgcctccaaactgtgttggtgttcctccttcatccccctactcacctccctctccgaagcctcctccttctcctgcctgggctcagcctctggctggtggtggtggtggtggtggtggggcaagtcctcgcgcctctctcctccgcctctctcggccccctgccacaggctgcggtccccgcccagcacccgcacccccttctcctctgcctggaactgggccgtctctttgtcactggccttctctgccacccgcttctggaggtcccctccattctctagatgccgctgccacaggtcctcaaaggtctccatgggccccctcttcctctcctccttctcctcctcctcgtcctcctcctggtggagctggcgatgcccttgcatgcggatggcttgttcctggacctcagacttgtgggtcctctctgctacctcctcctcttcctcatccctcacctcctggctggacctcatcttcccagcctcctgcttcttgaaatccccaagcagcaggcctttctcctcggtggacgcacagccgtggggctctgtcccgcacaactctggcagaaagggaaaggacactctctaagcatccaattgggaaactgaggccgagtatggaggctcacgcctgtaatctcagcactttgggaggccgtggcggccgatcacctgaggtcaggagtttgaattgggaaactgaggccttgaggagttctgggccctgccgaaggtctcacaggggggctgcccagactacagggggagggtcctatttcatcccacctgggaggggatgttccctgccccatctggcccctctgcagggaaccacaagggtgttgctggtggccaggctctgtcaggtgtgaatgctgggcagtgccccgctggtccaggcaacagggctctgggaatgaggacctcttcctccaggtagcctgggtgggagagcatgtgggcacctgggcaggaccctgggtggggtagggtagggtcccatggggttgtggagggcaagtggggcccggggcctccttacccttgtggagaagagcagtgcagggtcctctctggacctggcccacggtcagcacctctgtgaccacctctgccagacagcgggtcagctggggggcaggggtgccgggtcagaggggaggttgagggcaggggagatggggaggagagcagctggtttgagggcaatgaggatcatggggcaggctgtgcagggagggcagggccccagctaggtgaggcagggcaaggcctccacactcctcacctcctccttggagggtctcggtgccaagggagcagcggtggctgtggagaaaggagatggcactgggctttgccgccctggctgctgtccccggtaccgaccccagctccatgggcgtcccggtccccacacatcccctccccatcccacccggcgggtgtactgtcccccgctggaggctcggcccctgaagcctctccactgggtgcactgcctgccccctcccactggagtccccgctccccggcccctggcaggtcccgcactcggcaggtcccgcactcacccgcccccagcaggagcagccgcagcagcagcagctcagaggctggccctcggggcggcatggtgggcgtccaacgggtccaaggcgctgtgcgggccagggttgcagcgccttataacccacgcggggaccctgcaggggaggaaatgatgtcacccccgccccctccccgcccgcggcggggcgacatctgcggggcggctgcctgcctgagaccctcaattattcatgaggcctccgccctgcacgcgctcccctcgaggcttcaggccaggagctcagcgcagatggtggaggcctcccttttttcgtttttttgagacacggtctggctctgtcacccaggctggagtgcagtggcgccatcacagctcactgcaggctcctgaacacacttgatcctcccacctcagcctcccgagtagctgggaccacaggcgtgtaccaccatatctggctaataatgtttattttttgtagaggcagggtctcactttgttggccaggttggtctcagactcctgggctcaagtgatcctctcgtctgggcctcccaaagtgctgggattacaggcctgaggtgccacacctggcctggggggatctcttcccagagcagcagggtctggtacactcgccctccacgctggcaggtggaccggggtgggaacccagaagcagccactcacagatggtccccaggcaactccttcccttcctgggcctgttttctcacagggtcttgttacaggctggagtgcagtgcctcaaactctcacacaagggatcctcctgcctcagcctccagatcagttgggactgcaggcttgcattatcatgccacagtaatttttttcattttttgtagagaggggttcttgctatgttgcctagactggtctgaaactcctgacctcaaatgatccgcccacttgggcctcctgaagtgctgggactacaggcgtgggtgagccactatgcttggctgagagtgggtctcataaacccgcttcctcagaggctgcagttggcttctggcctaagccccagctccaccacgtgccagctgtgcagcccaggataaccgcttaacttctctaagacctgtttcctcactgtaaatagggttggtgacaacctactctacagttggacagtgaggattaaatagttgtgtgtacagtgtttagggaagtgcctggtactgggaacggcacacgtccaagcatcttcagtgcagtaatttttgttgagcatctactacatgccaggtcctcttttagacctgaggctacagccctgagccaatgggtggatacctctgccctcctggagctggtatttgacacacatcaatacatattaaggaaagaaggcagaaatgcatcaaaaatatagtatctcaggctgggcgtggtggctcatgcctgtaatcccagcactttgggaggccaaggcaggtgcattacctgaggtcaggagttcaagaccagcctggtcaacatggcgaaaccctgcctctactaaaaatacaaaaaattagccggacatggtggcacctccctgtaatcccagctatgcgggaggctgaggcaaaagaatctctcagaggttgcagtgagccgagatcacaccactgcactccagcctgggacagtgagactccatctcaaaaaaaaaaaaaaaaaaaaaaaaaagtatctcagatgtaggtactgagtgctgggggggttttactgtggtcacggaagacttcttggaagaggtgacatttgagctaaggcctgagtgacaagatggaggccagcacacaccatctaggggagagacagccagagagggagactcaccaatgtaagtgcacgagtcaggaaggagtttggagagtttcaatgtcaaggcgggtcgggtggaccaaacaagacagaaagatgggctgaagaggaaggtggagcagctcaggtggggtcttaggggcctcgatgaccactttacccttttactctgagacgaagccacaggagacctctgagcaggggtgggacacccagctgaggtgctcacaggtccctctggctgtgtggcgaggatggagaacagggagccagtgaagaggcttccagggttaaccaaaggggagggatcggggagcagggcccaggtggggtcagggaggagagaacagtaggcagagtctggaaatcttttttgagacagagtctcgctctgtcacccaggctggagtgtagtagtgtgatcccagctcactgcaacctctgcctcccgggttcaagaattctgcctcagcctcccaagcagctgggattacaggtgcccgccaccacacccagctctttttttttttagatggagtctcgcactgtagcccatgctggagtgcagtggcgcgatctccactcaccacaacctccgcctcccaggttcaagtgattctcctgcctcagcctcccgagtagctgggattacaagcgtgcgccaccacgcccagctaatttttgtatttttagtagagatggggtttcaccatgttggccaggctggtcttgaactgacctcaggtgatccgcctgccttagcctcccaaagtgctgggattacaggcgtgagccactgtacctggccagattctggaaatattctgaaggcggtgttgccagggttgctaatgaagtggagtggatatgagataaaagtcgaggctaacccgaagggctgtggcctgggcagccgggagaatgtgctgggatgggcatgcctgaggaggagcaggtgcaggccaagtgatcagaggaccaggtagcttccctgagtttgggatgcccactgggcccctacctggagctgcagaagggacagctgcatggggagctggggactgaggggtgaggctggggctggggtcagctcgaaggaaccctcagagggtgactctgttctggcttgtcccagaggaaggggagagaattcagcatcctctcagcaaccctggtggccccaggccagcctccatgtgcactggggggtggctaggcacttccagccatggtctttgcagccacagaccctttgaggatagtgcctccaagcggctgctcagcagctcctagagagccaggcatctcccttgttcacagatccacagaggcctttgtcctgaccatttattggggactttttgctcagcactgtaggaggaaagaaggaaggagggatggaagcctcttcctctgcttctcctgtccctagaaccgtaaagcccagacgtcctgcttcccactgggaccctcaatgataacagggtcagtgactgactctgaggcagcaaggacagaggagaggtggaccccgtggtccaggggcccgggcgtggagctgacaggaagaacacagatgtcaggacgggctcagcaacacaggtcccaggtgtccggggtctcctgaactccaggaagcagtgacacccccgagggctgctgtgggtgggttcttagcttacagcaggctggccaggcagcccaggcttccggggctggttggggccgatgtactggagaggcacgtgggtaggggctgtgatccgatcagtgccgaggtaggactggagggcagggggcacgagcactgagccgtcctggggacagagcagacctcaggacactgcagatgccccagccctccccggcgctgagctgcctctctgggtgggcccctcagcccctcaccttctgctggttactctccaggagcgcgatgagaaggcgggggacagcacaggcggtggcgttcacctgtgagacagccatgctcggaactggcgcccaccccaagctgagcccggggaggagccaaggtgggtgggtctagggcggcagaggctgcgggcgagggcacgcgggcaggaggctgtgcgggcctcaccgtgtgggcaaactgcagctccccagcctcggtctggaacatgatgtggaggcggcggctctggaagtctgtgcagttggaagcactggtgacctggggtggaggagcggcaggctgagcggatcagggatggggggcaggcctgtcctcctgcccaccccgtccccagcggcacagggctcacctctccaaagcggcctcggcctggcatccaggcctcaatgtcaaacttgcggtaggcggggaggcccagttcttgggtgggcatatccaggaccctgcggtcaaggacgaaggtgtggggaaggtcagcgggtgagaggaggagcaagaggaacaaatggaaacgatggaagagaaggcagccaaaaagcaggaaaaagcccaggagtttgagaccagcctgggcaacataaggagacctcatctactccaaaaaaacaaacaaaaaaaaggagacgatagtgccaaaggagagagttgtgaggccaggggtggttatggagaaggtggtacatggagggggaagcacaaaagaggttgatgggaggggaaaaaggcacgtggcagggtccaccggctcttcacagtggccattcacacatttgcaccttctaggcaccctcggttttttttttttttttgagacggagtctggctctgttgcccaggctggagagcagtggcgcgatctcggctcactgcaacctccaccttcagggttcaagtgattctcctgtctcagcctcctgagtagatgggattacaggtgtgtgccaccatgcccggctgatttttatatttttagtatagatggggtttcaccatgttggccaggctggtcttgaactcctgacctcaggtgatccgcctgtcccggcctcccaaagtgctgggattgtaggtgtgagccaccgtgcctggcctttattttttttttttagagacagggtctcactctgttgccccaggctagagtgcagtggcatgatcacagctcattgtagcctccacctcctgggttcaagcaattctcctgcctcagtctcccaagtagctgggaccacaggtgtgtgccaccatacccggctaattttaaaaaacgtaaagacgagctctcgctgtgttgcccaggctggtcttgaactcctggcctcaagcaatcctcctgccatggcctcccaaagtgctggaattacaggcgtgagccaccacacccggcttacgctcccagttttttacaatgggtcacccagaaaagaagtccacatttctcagcctctcttgaaagctgcgtgtgactgacagggtgagaggaagtggggttcccaacctctggctcccccttttcccacccccactctccactgggaggtgaaaaagtatcttgggttgcacagatgaggcagtggcccagagagagggggagcagcaggaggaaaggggcccgggtctccactctggcacaccgtgcactgttcgtgcttctgttacagtcctgtgagggacgaccggcacacggcagacagattgggatcctgtatatgctcctgtaatccttgtacaggaaaatgggggcaacgagggggctggagaggtggttccagagcgaagagcagctggccagccccttgtccctcccctaccccacccctgccatccctggatccctggcccctctccacaccggaagtgcaagcccagctctgtcaagatctccatctgaagggacaggaactcctccagcagctgtgagctctgctccagcccagggcctgtcaccccaaacatctccacctgggacagagggcacaggagtcaggaggctctgagctcttggggtggccccccaccccagccccgtttagtcccagcgacaccagccttggtgaagtggtgtactcgatacagcccccggggttcctgtcccgtgtttgtctctgcccggtagcaggtgctggagcaaaccatcctggcagagagcagggaaagtcgggtcaaggagggaagactgattgtcacaggtggggtcaaggtctaaggaaaccaggtgtcacctgactggcaggtccctgaaggccacggtgtggtccatgaagtagcctgggaggagagaccacagggtgagccagggctgccagtgcccagaggaagcctttggaagattaagaggcactccctctggtggatgcaaccccaggtcaaggcccggggctggattatcactgtactgctgtacagtaaacaacctacacagccgtacatgttggccctggggctgctgagctgctcggggcaggtgatcccccccagtgctccctggacgctcccagttgtccttccacatcactcctgctcctccccaccacccacacaggtcctcacctgcaagccccacctccgctgttccagccaggttgagatctttgaagcgggcagggtcgatgttgtaaatttgggatgggttggcatttggtgtcatcccacagccttcctgggggaggaggccaggccacagggatcaggggacaggtaaccctggcctctcgttttacagtcccaaccccagctcctcccctgaaaacatctggagctgccctggcctccctggtatggcctggccccctcaacccagccccagggcggtctcctcaggtttccctgcctcgggcacccacggcagggcctgacacccaggtgggcgagggaagcggagaggcctcactcacaaacactgctccgcggagaaggtctggcaccgtcatgggggtgaagccctgttcaggggagaggatgagtgagcagagctgggacccctaccagaccccaagctcagccctgaagaaggggtgctgcagagccccttcctcctcagacgaaactgaggcaggggctggcgcagtggctcacccatgtaatcccagcactttgggaggctgaggtgggcggatcacttgaggccaggagtttgagaccagcctggccaacatggcaaaaccccctctccactaaaaaggcaaaaattagccggcatggagatcgtgctactgcactccagtctgggtgacagagcgaactctgtcaaaaagaaaaaaaaaaaaattagccagcatggtggcatgtgcctgtaatcccagctactcaggaggctgaggcaggagaattacttaaacccgggaggtggaggttgcagtgagccaagattgcaccactgtactccagcctgggtgacagagcgagactccgtctcaaaaaacaaaaaagtacagatttggccacaccctcccctgcttaaaagcctcccatggctccctagtaccctctgaaaatgtctgagttcctcaccgtgaccaatgctccatgcaaccagtccctgccatgtttcaatggatgctatgattcccaaatgctccctttataccgcaagcaggcagtgaggtgcaatgattacaagcacaggctctaggcccagctccagactggctgtgagaccttgggctataggtacctcccctctctgggcctcaagccctctctgtaaagtggggatgatgacagcacccacttcataaagttgtcgtaaggactaaatgtgtcaatgatacacatgaagctctgagagcagtgactagggcagagcagagatcactcccatccccgttgggccctctgagctcagcttcgatgccaccccctccaggcagccctcctatcttggcccatacccggcggagaagcttgttgaatgtgaagttgaccaggccgtgctgcaggagggctccagccccgcgcaggtaataggaccggtggccagacacgtgggacaggcgcctgggagacagacagacaggcgggtgcacatgggccaggctggcagggaatgtggggatgaaaacacccgggggaagaggcccggctgctgggtggggctggggcatcaaagattcatggcatttccacatctcacgctgaggccaatgaggcaggagccagctgtcggggtgcaggcagctgggagaggggcgtggggagccaggggaggggctcacttctgacggatgatgtcgagtttctcgccaatttccaggtggccccgaggttggaaggagaaaactggatgtgggtgaaaagcaccggtgtaaggcagcggggagagagggatggggcccagatagaagcttccagagacagcagagaggagggacggtgagagaaaataaaggaggggcaggaggagagaagggagaagaagacacggaaagggagggaaagggaagaaaagacagacaggaagggagggagataaaaacagagacagggagaggaaatgagaggaggcagagagggaaataagagggcgcggggtggggaaggcagagttagaaacagaggagagaggccagaggagaaggaaacaccacgaggaagggaggaggagaatcagagaggaggcacagagttggggagaaaaagccccggagacagggaccaaagcaggggggtcagagagagagacagagacacacacacactcacacacatacatacacacacagagatacacacagaggtacgaagacacacacacatatacagacacacagagacagacacatacacagacacgcagagacagacacacagatacacggatacagacacacaaagacagacacgcacacacagatacacacaaagacacagatacacagacacagatacagacatacacacagagatacacggagatatgcagatacacacacagacacacagagacagacacatacacacagacacagagaaagacacacagatacatacacacagatacatagacacacacagacacacacacacacaaacacagatatacacacacagagatagacacacacatagacacacacacacagacacagacacagatacagacacacacaaacacagacacacacacacagatacagacacacacagatacacagatacagacacacacagatacacagatacagacacacacatacagatacagacacacagatacagacacacatgacacacagtcacacaacacatacatacacgacacacactcacacacatacgatacaatcacacaacacagggtgagactgcccaatggtgaagggggagagaatgaaaacccaaggaccgcctctcagagacagctcgagctcggccaaggcaggaagctggagccacctcctgtaccgccaggagttctccaggctccagacatgttcccagaccccaggggcccccaccccgagaccccagaacccccacaccgcagggcttgtcagctcccaggcctggggtgtggcccacctggcttgtctccgaccatgtggagcactcgagcctggctctcatccccgacgggctgcagggagacagcaggagtcacggaaaggtggcactaggtgggcccctggcctccctgccacccagcacggtgctcaccacgtctgggtgggtctggttgggcagcttcagcgcctgcaggtagaactgctcctcaagctgggcctccctggggtacaggtgaacaagctccttccggatctcccggccacgtgcccgcagaccctggtacttggggtcctgggggcagcacaggtgggctcagcccgggagagggtcaggactccctcatccagtgtgaccttgatcctgaccggcagagcccctgtggtggacattcatgcctcttctccaggcccaggatcctgaacgtcttcgcagaacttcccttaccaccacatggcaggtttgtggggaaaagaatcaggcctggccaactagaacgttctattgccttggccacaatgactggctcagagacaggcacctgatgtcagctgaactcatgagaatcagccccaggactttaactggaactatcaggaaagcgtgcttgactttgcctcctacttacacaaggagagaaagctggcctgggaatgggaggaacgtaggaccaaatatggagccagcacctggatccagccgcacctgaagccagttttagtttcatgcatcaatagagcctattttttttttccccttaaacctgtttgagttgttttctgttacaatagtagaatcgtgactggcagggtatcctccctgcccacccccaaccctggataggacatcaactcttcacagtacctgctgcacttcaccactgtcctggtttgcctggtagaaaagagacagggtgggtgattaggttgacaaagtcgagggtggggaagagaaaaaatggtgaaaggtcaaacaaggccagaggatcttagtctcctgctctgtcagtgcctagctgggtccctctgcaactctgtgtttctgtttctctattgctaacgctacaaggaggcaagataattaacagtaatcacagccgcagatccgtataggaagtgatgcctccatgccaggctctatgtacagggctctcccatgccatgatttcttcaaaatccactttaggaggtaggcattcgtgtaaaccctgtgatatggtttggctgtgtctccacccaaataatatctcaaattgtaattccacctgttgaggaagggacctggtgggaggtgatcgggtcctgggggcggtttcccccatgctgttatcctgatagtgagttctcacgagatctgatggtttaaaagcatttggcagttaccccctgtggctgtctccagccaccatgtggaagggaaagtgccttgcttccccttccgccatgattttaagtttcctgaggcctcccagccatatggaactgtgagtcaattaaacctcttttctttataaattacccagtctcaggtattcttttttttttttttgagacggagtcttgctctgtcgcccaggctggagtgcaatggcgcgatcttggctcactgcaagctccacctcctgggttcacgccattctcctgcctcagcctcctgagtagctgggactacaggtgcccgccaccacgatcggctaattttttttgtatttttcgtagagacaaggtttcaccatgttagccaggatggtctcgatctcctgactttgtgatccacctgccttggtctcccaaagtgctgggattacaggcgtgagccaccgcgcccagcctgatctcaggttttcttttttttttttttttttttgagacggagtctcgctctgtcgcccaggctggagtgcagtggggggatctcggctcactgcaagctccgcctcccgggttcacgccattctcctgcctcagcctccctagtagctgggactacaggcgcccgccactacgcccggctaatttttttgtatttttagtagagacggggtttcaccgttttagccgggatggtctcgatctcctgacctcgtgatccgcccacctcggcctcccaaagtgctgggattacaggcgtgagccaccgcgcccggcctcaggttttctttatagcagtgtgaaaatggggccaggcgtggtggttcacaaatgtaatctcagcactttgggaggctgaggtgggcagatcacctgaggccagcagttggagagcagcctggccaacatggagaaacctcatctctaaaaccttgtactaaaaatacaaaaatcaggccgggcttggtggcttacgcctgtaatcccagcactttggaaggctgaggcgggcggatcacgaggtcaggagatcgagaccatcctggctaacatggtctctactaaaaatacagaaaaaaaattagctgggcgcggtggcgggcgcctgtagtcccagctactcgggaggctgaggcaggagaatggcgtgaacccgggaggcaaagcttacagtgagccgagatagtgccactgcagtctggcctaggtggaagagcgagactcagtctcaaaaaaaaattagctgggtgcagtggcacgtgcctgtaatcccagcgactcaggaggctgaggcacgagaatcccttgaacctgggaggtggaggttgcagtgagccgagatcgtgccactgtactctggtctgggtgacacagtgagactctgtctcaaaaaaaaaaaagaagaaaatggactaatataccctgtctgtagattcgaaaatggaagctcagagaggtaaagtctatcagtgtgcatttgagggcctgcaaccaaggccccttgacattctgaaccttccatgatcctaagcagctgagggaatcgaacagcctgggtctgaatgttgggcacctacatgctgtgagcccttgggaaaatctctgccccctctgagcctcagtatccccatctgtgaagtgggatgataacaggacctccctgggcagggctgttgtgcagcttccctgagatgagttagcactcaaagaacattaaatgatccattgtgttgctttcattggttgtccatgatgtagacagcccgaggctggccactcagtaggtgctgggagatgtgattcttggtggcagaggcctccaaacagagtggtaaaaaccaactgcctaggtgcgaaccttgcctctcccacttcctggctgtgagacttacgtactttttctggttgttttttctcggagacagggtctcactctgtcgcccaggctgcagtgtgatggtgcgatcatagctaactgcagcctcaaactcttggactcaagcgatcttcctgcctcagccccagagtagctgggactacaagtgcgtacccccatacccggccatttaggcccgttttaatctcttagggcctcactttttcccagctgtaaaattgggtttgtattgttcctgtgtgacaaatggctgtgaggattaagagtatggaaaacacctggtatggtgtgtagcgacttctacataaaggtctgctgttgtttttatgattgtttttaagccgtctgtggcagacactgttggttgtataacccaagatccctccttccaggccaggcgcagtggctcacacctgtaagcccagcactttgggaggccaaggcgggtggatcacctgaggtgatgagtttgagaccagcctggccaacatggtgaaaccctatctctactaaaaatacaaaattagccgggcgtggtggcgcatgtctgtaatcccagctactggggaggctgaggcagaagaatcacttgaacccagggggcagagggtgcagtgagcccagatcatgccactgcactccagcctgggtaacagagtgagactcggtctcaaaaaaataaaaacaaaataaagatcccttcttcctccttccccacagaactctgacgcagttcacccttccctggtagcctgtagttcaggggaagtgggcccaggtggaggatggcctctgatcagcctatgccggctgccggaactccattcctccggctgacaactggagtgtggtgggggtctgggcccaggggacacgaggggactttgctggatgcttcaggaaaggtgtacttgctcctgaaaaaggaactcaagccagagaagtctctgtctccttcccctggcacagtcatgtgaggagatgctggactacagcagccatctggaaaccctgatgggaaactgaggaaagatcagtgcagtgaagttgccggtacagagagaaggaaaggacctgggctggggatgctggaagaaccgctaattaatcagccctagggatgccagggtcctgcaacagctcgctatgtgaggtaatgcatgtccacattgttcacgcttgcttatttatttatttagggagtctcgctctgtcgcccaggctggagtgcagtggcgccatctcagctcactgcaacttccgcctcctaggttcaagcgattctcctgcctcagcctcccaagtacctgggattacaggtgtccaccgccatgccgcctaacttttgtatttttagtagagatggggtttcaccatgttgcccaggctggtctcaaactcctgacctcagctgatccaccaacctaggcctcccgagtagctgggattataggcgtgagccaccgtgccagcctgttcaagttctttaaattcggtttcctgttacctgtgtctagagacaccctcgtggccactccccacctactcagggcaccatgctcaccagcagggcccgcactgcctcagtcacagctgccttctcttcctccaggctccggatctgctcctgcagctgcctcagctcctgccatgtcgagatctggggtggatataagagaaaaggagatgaagcagccatcacccctacccttctctctggagcccactggccacctggacctgcggcgcagtgaggcagagatccctacctagccctcagtggccatcctcccctcctcccttcagtactggaatgccctgaggttcagctggccacacagatgcccagaattcagacacactggccgagcatagtggctcataactataatcccagcactttgggaggccaaggtgggtggatcacttgagatcaggagttcaagaccagcctggtcaacatggtgaaaccccatctctactaaaaatacaaaaatcacccaggtgtgatggcaggcacctgtaatcccagctacccaggaggctgaggcacgagaatcgcttgaaaccaggaagcggaggttgcactgagctgagatcgtgccactgcacactccagcctgggcaacaagagtgaaactctgtctcaaacaaaaaaagtctctaaactagcactttaaaaaatcatggctgggtgtggcactttgggaggcctaggtgggaggactgcttgagtgagcccaggagttccagaccagcctgggcaacacaggaagacctgcctctaagaaattttttttttttttttttttctgagacagagtctcactctgtcacccaggctggagtgtagtggcatgatcttggctcattacaacctctgcctcccaggttcaggtgattctcctgccttagcttcctgagtagctgggaccacaggtacgtgccactgcacctggctaagttttgtattttttaatagaggcagggtttcaccatgttggccaggctggtctggaattcccggcctcacgcaatctgcctgccttggcctcccaaagtgctgggattgcaggtgtgagccacagcacccggtctctacaaaaaaactttaaaaaaattagctgggtgacagattgacaccttgtctcaaaaacaaaaaaaattgttacaatgtacataatatgggaggctgaggcaggtggatcatttgagcccaggagttcgagaccagcctgggcaacatggagaaaccctgtctctacaaaaattagctgggcatggtggcacatgcttgtaatcccagctacttgggaggctgaggttggaggattgcttgtgcttgagcctggaagtctcacggagcctgagaggctgccatgagccaagatcatgccactgcactccagcgtgggtgacagagtgagaccttgtctccaaaaaaaaaaaaaatttattatttttttgaggaactgccatacggttttccatggcagccgtaccactttatacacattcccaacagcaatgcacaacgattccgacgtttccacaacacaattcttgccaacacttgtccttttctgttttgtttttaataatagctacttgaggctgggtgtggtggctcacacctgtaatcccagcactttgggaggccgaggcaggtggatcacaaagttaggagttcgagaccagcctggccaagatggtgaaaccctgtctctactaaaaatacaaaaattaattgggggtggaggcgtgcgcctgtaatcccagctactcaggaggccaaggcaggagaattgcttgaacccgggaggtagagattgcagtgagccaagactgcaccactgcactctagcctgggcgacacagcaagactccatctcaaacaaacaaacaaacagctgctcaaatgcacgtctaaactactactttgaaaatgaagagaatagccaggcgcagtggctcatgcctgtaatcccagcactttgggaggccgtggccagtggatcatttgaagttaggagttcgagaccagcctggccaacatggcaaaatccatctctactaaaaatacaaaaattagttgggtgtggtggtgcacaactataaccctagctacttgggagactgaggcacgacgatcacttgaatcaaggaggcggaggttgcagtgaccggagattgtgcgactgcactcaggcctgggcgacagaggaagactcagtcttaaaaaacaaacgaacaaacaacaaaaacacacccctggcccccccccccgcaaaaaaaaaaaacaacaactagcactttacaaatgaaagagaatataattaaagaacaagaatgcatcacacgtggtaagagcaataattgttaatgaaaccggtttcaattttgggtgtgtgtactgggtcaggatgtgaaatgtatttcttactcttggccacaaagtttgaaaaagcctgctaaaggatgtgacgctctaaattatctacatggccatcaaatggaattttccatcctacctccaggcttttgtatattctggtcccctacttgggatactcttcttccctcttccctggtgatttctcaatccacagatctttgtttaatgccacctcctctgagaagtcctcccaggctgtcctccactttgccttcacagcatttaccacagattataatgagtatatctgtctctatgaatttgattactctaggtagtcaaatttaccagaaattgtaattagtatatatgtatagttgtatatgttaaatgtcttttagtggggcatggtggctcacatctgtactcctagcactttgggaggccaaggtgggtggatcacttgaggtcaagagttcgagaccagcctggccaacatggtgaaaccccgtctctactaaaaatacaaaaattatgcagatgtggtggcatgtgcctgtaatcccagctactcgggaggctgaggtgggagaatcacttcaacctgggaggcagaagtcgcagcgcactccagcctgggagacaagagcaaaactccatctcaaaaaaaaaatgtcttttactagactgtgaactcagatcatgagagggcacagcagggtacttaagattgtggagtctgggtgtggtggctcatgcctgtaatctcagcattttgggaggccagggtgggaggatcacttgggcgcaggagttcaagaccagcctgggcaacatagtatgtccctgtctcaacaaaaaatacaaaagtttagccgggcgtggtggtgtctgcctgtagtcccagctacacgggaggctgagtgggaggattatttgagctcaggaattcaaggttccagtgagctataattgtaccactgtactccatcctgccatcctgggcgacagaacaacaccctatctcaaaaaaaaaaaaaaaaaaagtggattctaggccagaaagcacaggttaaaattcccactctgccacttcccagttgcatgacctagcgcaagtgaattagcttctcgaagccttagtttcccctctgataaaatgggagaaataatggcacctacttcatagagttgctgtgaaaattaaacgaggttaaagtgaataaagcacttcaaacaggctgggaggggagtccaagagaggaatgggaagacgtggggaccccactatcgttagcacctcaacacagagatattgtgaacccggtcctaattcccttttataagtgctagcaattttattattattcaccgcatatttgcaacatctagaacaccggaatatagcagttgcaccttaagtatcagtttaatagaaccattcattaatggattcattcattcattcattaactctatttaactgcctgctatgtgtggcggaggtgcacaactctccctacctctctctctaaacgcaagagctccaccacaccccagccctgaccccgtccgattcacacttggctccccattttcctttgtggtcttagggaaaggctggcatgaggttgcagcacggagggcaatgtcacatagcaagttcctaaaggacaggaggtacccagcgagcagtatgaaacaagcgcataatgggtgtccaggacacagtaggcattcttggcacatagtagggcctcagcactcactggacaactggcacataagtgggtgccatgcacaagacgttggctaacttgggaaataactaaaattcctactacaggttcgccccctgccggagggcatcttgcaaacccaattcttccgtaaagcaaacgtctgcgccccccggccggcgcaggcgcactcacgatcgcgggcaggtccgccgagcgcagctcccccttgcggagctccagggcgtgtgcggcctcttctgggcatgcgcagaaccgctctatgtccagctgagggagtgcgctgtagccctcgcgcgcatactcgtacaggaggttccggtttcgtttctctgtagtgaaacttctccttggactatcgttggagatgcagcctccccggggccggaacccccgacgagtcagcaaaggccacaagcgccgcgccatggacgcagccatcttggaccgggaacaaggcggcacttcgtcccgcccactccgcgtttagaccaattgcaaggcagcgaacctgaccgtgacgagccaatcagatcctgaggaaagttgaccgcgatagagtccttcgtcgcccaatcgtcgtctgtgtcccgcctcttcagtgacgcgaggcagaaccagccaatccctgcacggatagcgcccggaagaggctagaagctggattcagcgtgtccgcgacctcacctttaggtcctgtgaggtcggtggaatcctggggtcctccaaatctaccaggccatctccccagtttcccagttcttcctgcgtgcgggcgagagtggttgggccctcgggaacccactcagagcgaggctaaatttacggagggactttctgttagcagcatgagggcctgtggttagacctatagaggtatttcctttgatttaagccagaaagtcctgagagcggatcggggagcatttgcggatcggtcactttttcctcctttctgagtctcttatcccctaccacagggacggcccaggtggcaggatgtcctggtctggccttctccatggcctcaacacgtccctaacttgtggtaagtgggggacttgggcttcagggacgaggctagagggggagggttattcgctcttggacttgtgtgcctccgtcggagccccgagggaaacgggggtggaaaaacacggtggggttttggcagagctagggctgctagagcaagaggtgggaagcagctgcatggagggctactgcgtgtcaagcggcgtttgggtcagttttattatttatttatttaagatctccctctgtcgcccaggctgaagtgcagcggtgtgatcacagctcactgcagtctcgacctcctgggctcaagtgatcctcccgcctcagcctcccaagtagctgggaccacaggcctgcagaaccacaaccagctaactttttgattctttgtagagagggaggtctccctgtgtcgcccagtctggccttaactcctgagctcaagtgaccctccacagcctccaaaagtgctaggattacatgcatgagccactgagcctactattattttaaacagcattaaaaataatgcttcctggccagccgtggtggctcacgcctgtaatcccagcactttgagaggccgaggtcaggagttcgagaccagcctgaccaacatggtgaaaccccgtctctacttaaaaatacgaagattagccgagcgtggtggtgggtgcctgtagtcccagctgctcaggaggctgagacaggagaattgcttgaacccaggaggcagaggttgcagtgggccaagattgaggtactgcactccagcctgggcgacagagtgagactttgtctcaaaaaaaaaaaagaaaaaaaaaaaaaaggtaatgcttccttgaagaataaagagttacttttgtctgtagataacattagatgtgaacaaatgcatctttgtaaagtgctttaaacaatgcctaaaacaccaaaattgagttgctactactctaagatctgttctctgggataataacccctttcggccctctccaggcccagctctggttccccggctctgggctacctgctccatggctaccctgaaccagatgcaccgcctggggccccccaagcggccgcctcggaagctgggccccacggaaggccggccgcagctgaagggtgtggtcctgtgcacgtttacccgcaagccgaagaagcccaactcagccaatcgcaagtgctgtcgagtgcggctcagcactggccgcgaggccgtctgcttcatccctggggagggccacaccctgcaggagcaccagattgtccttgtggagggcggccgcacccaggacctgccaggcgtcaagctcaccgttgtgcgtggcaagtacgactgtggccacgtgcagaagaagtgacggctgggggcacagtgggctgggcgcccctgcagaacatgaaccttccgctcctggctgccacagggtcctccgatgctggcctttgcgcctctagaggcagccactcatggattcaagtcctggctccgcctcttccatcaggaccactattaagccataggagtcctgggggtgcaaagggtgcccctctgtcaacacccttggctcctgtgtttagaggggtggcctgaaggaccttttctgctgggacaagacactgtactgccctctgctgggaaggggttttaataaacagaccctggcgcttgtgatgtaaatccccttgtggagtatttgccctctgtgtggctgtggcagtggacatctctgagcttcagtttcctccagaaaatagctccattggtggtatctcctttgtttggtttggtgaagattaaattcgatgctctatgtgcataacacgcacggagggctcttttttttttttttagacaaagtctcactctgttgcccaggctggagtgcagtggcctgatctcagctcactgcaacctctgccccccgggttcatatgattctcctgcctcagcctcccgagtagctgggattgtaggcacacaccaccaggcctggctaatttttgtatttttagtagagacagcgtttcaccatgttggccaggctggtctcaaactcctgagctcgggtgatctgcccaccttggcctcccaaagtgctgggattacaggcgtgagccaccacgcctggcagagggctactgtattttaagcttaggagtcaggtaggtggcacagaggcccaggtcttcttcctgcaggccatgggttctgggcacataaactctgccctcaagcatggacagctggaaaatggcagtaattgtaatgttgatgtggaaggggtgtggaaaggattcaatggggtgtgctgctccacacccgggagctgttcttttattttatacgtgtgtgtgtgtgtgtgtgtgtgtgtgtgtgtttgtgtgtgtttgtgtagagagagagacagagtctcactgtgttgtccaggctggagtgcggttctatgatcaaagcttacttcagccttgacctcctgagctcaatagatcctcccgcctcagcctcctgagtagtcaggaccacaggtgtgtgccaccacacctggctaacttttccatttttttagagtgggaatctggctttgttgtccaggctggtctcgaactcttggcctcaagagatccttccaccttggcctcctaaaatgctggattataggtgtgagccactattatattatataataatataaaattattactgggttcacctgagctcaaattctgctccccgtcataattgctatgagacctggctatgttggttccccctatgggcctcggtttcctcccttggaaaatggcactgatgataatgctgactgcacctgatcatgtttttggccatgtaagatttaagaagtggggccaggtgcagtggctcatgcctgtaatctcaacactttgggaggccgaggtgggccgaccacttgaggtcaggagtttgagaccagcctggccaacatggtgaaaccctgtctctactaaaaatacaaaaattacccgggcatggtggcatgtgcctataatctcagctactcaggaggctgaggcaggagacttgcttgaacctgggaggtggaggttgcagtgagctgagatcagcaccactgcactgcagcctgggtgacagagtgagactctgtctcaaaaaaagaaaaaagaaaaaacaatgttggaactgtgtttatatcattgggctctggagcccagcactgctccaagccctgcctcccctacttactggctgggtgaccttgggcaggttgtttacactctgagcctggaccaaatggcgctgataagggtgcatgcttgagagctgtttggagcatcatagctgtctccgagttcctcttgacgctcaacacacagcctcctgagggtctcctgattgtaaacatgaggccacaaggtcttttaggatcagagctggtggcagataagtgcactgattacagataaaaattgcccatcccctcatatttggcaccagttttattgagctagtttgttggccatgcctagctgagaaatagagaagtggagggagatggggggatgggagagcttttcctcatggcacactctgctccaggagtctgtatacaggagtgtggagaaaaggaagtgttaccttgcaggaagttgcccccaaagcaagggcaggaggtgggggtgggggacttggcctctgatggaattctggaattctgatgagagaggtgctagcctgacctgaacaggagatgctgacaggcagtgctgggcatgttgcacagagatggctggttacacagccccgtggcaggatcccagagtgccgagaccagctgggtcgtggagaccctaacccagtggcgctagaggaattaaagacacacacccagaaatacagggtgtggagtgggaaatcaggggtctcacagccttcagagctgagagcctcgaacagagatttacacacatatttattgacagcaagccagtgataagcattatttctatagattatagattaactaaaagcatttcttatgggaaataaagggatgtgccaaaataaacggatgggctctggctagttatctgcagcaggaacatgtccttaaggcacagatcgctcatgctattgtttgtggtacaggaacccctttaagccgttttccatcctgggtgagccaggtgttccttgccctcattccagtaaacccacgaccttcagggtgggggtcatggccatcatgaacatgtcacagtgctgcagagattttgtttatggccagttttggggccagtttatggccagattcaggggcctgttcccaacatgtccccttttttgttttgcaaagtgataaaagcaaaggcagctttgtcacggtgagctacttctcacaggagtcaggatccgcatctgcacactatacaaagacaaacaacacagagtaaaagcacaatcatcattgaaatcacagagcctccaagtgtttttatccatttgaatgggttactagctgctaatctgtctgcagctccttcaagcactccagttcctggcattaagttcacgtgtgcctgggatactttaaatatttgttctttcaattttgcaatatccaaatacaagtttgtagagtggccttctagatgcttttttattctttcccaaattttgattttattaagagctattaacagtttccacaaatgcttatgtttagctcctagagcaggccatatcatttgaggctgaggtgccactatactgccatggttccagataataggaactcttgctgtatttcttaccatttctatcatctgaccattttgttcagatgagctgatcacagtgtggccatggcatgcagactgagaggtgcagttcaagctaaacatccccataggtgaccaattaataatgattccataggaattgttgtgcagcacctctgcctgttctgcaaagcaatcttcctaaacaagtacgttcatttttgctaactgggtccaatcctgtttacaaatatgtttttgagggcagtatgcctcaattataggagcagatttattatgagatcagaaagcttgtataactgtgtcatagagtgattacatccaggcattattgccagccaagattgataaatatgcccaataagtataattgtcctctgtgtcagcccttattgaaggaatactcatggcagtggtgatcatcgctatcatagctaccattaaattactcattgcgactggttgtcccactttcctcaggttttcttccaccatctgtgacagcttcttgatctgtctccaggtgggtggctgtgtttgacaggtgttgctcgtgacagttggggtcttcctcagcgtcagtctcgacatggctgcaaccgggggtggggggggtcctcagtttcctcccggaatctcttcctcagcatctggctcatgataaggtttcaggtgtcttgatggtatccaaatcggctgttgagtcagtcctggagaaacacaagcataacctctaccccaagttattattttacctatttcctaactttttgttattggatctctccaccaaactagttgttctgcttctgtctttgcagctggtttctgtagatgctgttcagctactgataggatctggcctttaggcaggctcaaaaaatttaaagttaacaatgctagattcagttgcatatggggtgtcccgtagtccttgttttccccccttttttttgcttttgcaactgctgtttcagggagagattcattctttccactatggcttgtccttgagaattatatgggataccagtaatgtgtttaatattccgtatagagaaaaatgtagctagagctcggctagtgtagcctggggctttatctgttttaatagaagctggaatgcccatcactgcaaaacactgcaaaaggtgacgcctggaagaggtgtatgagccctaatgtgagtgatgtaaaaagggtgcattctactcctaactgctgtttgcagttgggtaaataaaatcatcagttgttcatctgcaggaaattgtaactgagcattttcagttaattgtgtggaatgaatcacgtatgaagagtcagaaatcacattaataggcatatgaaaagcagtcactacctcaattacagctacaggctccactttttgagctgaagtatagggcatctgaaaaactttactttttgagccagaataagaagctttaccattactagacccatctgtaaaaacattttcagcaccttcaattggtttaaatttagttattttagggagaatccaattagttaatttcaaaaattaaaacagttttgtttaggaaaatggttatcgagaatacccacaaagtcagcttaattggtttgccaagtaagactatttataaaagcttgctgtatttgtgcctttgtgagagggataataatttttccaggatcatatccatgtaatttaacaatccgagttctcccatttcctatcatagtagcaatttgatccaaataaggagttagagtccgtgaattagtatgtggaagaaaaagccactctacaagatctcactcttgaacaataacaccagtaggtgaatgctgagttggaaaaattagcaaatctagagtcttctctggatctaatctatttatttgagctttatggacttgcttttcgattagccgcagctctgcctcagcttctcttgttaattaccgagggcttgtgagaccaggatctcctctaaggatagaaaatagattactcatggcataggtaggaatgcctagagcaggtcgtatccaattaatgtcccctagtaatttttgaaagtcctttaatgttttcaattgattcctatgtatggttgctttctgtggcacaatggtagtgtcatttactaaggtccccaagtaggagtaaggagtagtagtctgaattttgtcaggagctataattaaaccagcgcaagaaatcgaattttgtaagtgatcataacattggagtaatacttctcgagtgggggcagcacaaagtatatcatccatataatgaataatgtaacactgtgaaaacttttaacgagtaggttcaattgcttgccctacataagtctggcaaattgttgggctgtttaacatgccttgtggcaatactttccagtgaaaacgcttagcaggctgcaggttgtttactgcaggaattgtaaatgcaaactgttcacagtcttgctcagctaaggggatagtaaagaaacagtcttttaaatctatgactattaaaggccaattttttggaatcatagcaggagaaggcaatcctggctgtaatgtacccatgggttgtataactgaattaatggctcttaagtcagttaacattctccgtttatctgattcttttcttaattacgaaaactggagaattccaaggggaaaatgttggagctatgtgtccgttttctaattattcagtaactaattcctctaaagccttcagtttctctttacttagcggccattgttctatccaaattggcttatctgttaaccattttaaaggtataggttctggaggcttaacaatggccgccatcaaaaataatatcctaaaccttggcggaaacttgtatttctgcttgaagcggttccttcaaaccttgtaaattttttcctagtcccatactagggacataccccatttcatgcatcatatgttgactttgagggctatataattgttctggaattagaacttgtgctccgcattgttgtaataaatatcttccccataaatttataggtacagaagttttggttgaatagtcccaggttgtccatcaggcccttcacaatgcaaaatataactactttgatatacttcaggggctttaccaactccaactatgttaaactgagcaggttgaattggccatgtggacggccattgctatagagaaatgaaatgtccgctcctgtatctaccaaacctttatatttctttccctgaatagttatttcacaggtaggacgtttatcagtaatttgattcacccaataagctgttttgccttgtttatttgtgcttccaaatcctcctgttcgtttaatttcactttttcccattcccacatatggcacattcaggagctgtgctatgcgctctcctggctctgctttccagggaacagaagtagaaaaaacaatttgaatttctccattgtaatctgaatcagtgactcctgtttgtacttgtaccccctttaaatttaaactacacctccctagaagtaatcctattgtccccactggcaagggtccacagacccctgttggaactttttgcgggggttcctcaggcagaaggctcacagcttttgtgcagcataaatctactgtggcattactggctgtggcaggggacagacattgtacaggggtgaaggagtggcctgaggcggaaatgcccctggtttcgaacagggcccgggatgggcccctcatggcatttcccgaaatcgggttcccatctttatcaaacttagagtgacactgattagcccaatgttttcctttttttacattttggacatatatcaggctcagcagttttcttttttcccctgtctgccggcctgacttgctgatttttttctgcattcttttttagtgtgcccatgcttcccacagttgaaacaagctccaggaaatggagtatttcctttatccactttcagtcctgccattgcctgtgccaacaaagtagctttatgcagattacctctgataccatctcaggccttgatataatcaactaaatgtgctttccctctaataggtcacagagcagcctggcaattgagattagcattgtcaaaagctaataaccgcaacactatatcctgagcagccgaatctgcaatcacctttttaagatactcctgtaaccgagctataaaatctgtgtacggttcttttggtccctgttttacagcaccaaaggaagggtactgttctccacctgaagtgattttttcccaagctctgatgcacactcctctaagctgctctatggcatcatcctgcatgaccacctgtgcatctaaaccagcccagccgccgacccccaaaagttggtgtgcagttatatcaatttgaggttgggcctgggtgttgcgaggagcctgaatggaagcttcatctgcccaccaagttttaaattgtaagaactgagcaggagttagacaagctcaagtaagagcgtcccagtcaggaggaatcatccgactggaaacagcaacattctttaacagtcccgttacaaaaggagaacctggtccatattgattaatagcttgtttaaattctttgagtaatttaaaaggaaaaggctcaaatgtagctgtaatatttccctgttgatctgggggatgtattctaacagggaactgccaagcctctaaatcaccctctcttctagcttgctgaattcctgcctgaatggaactgagagcagtcgcttgaggcactgcccaaacagtcactggggcaactacttttcacccagtgtcctctggaaaagaaagatctggagggtcaggtcactctttttcttcacactaaggaggggatgcagaagggtagggatgaacctcttcctcctttgccactttagctttagctggcaaacaaacctgctctgttacctcttccattacttcattacactctccctgctcctcatcagtgtgaaaaggttccaaggtggaatgaaccagaacccacacctgtcccattgctaccctgatgcttccgagctccccttcttactcaccatggggattgcttaagagtactcgggtgtcctccagcttagttccacgttctccaaccgtcgctccagtgactcttcgacctgggttcgagcccccacgtatgggtgccacttgccgagaccagctcggttgtggagaccctaacccagcggtgctagaggaattaaagacacatacacagaaatatagggtgtggagtgggaaatcaggggtctcacggccttcagagctgagagccttgaacagagatttacccacatatttattgacagcaagccagtgataagcattatttctatagattatagattaactaaaaacatttcttacaggaaataaagggatgggctgaaataaagggatgggtctggctagttatctgcagcaggaacatgtcgttaaggcacagatcacttatgctatggtttgtggttcaggaacccctttaagcggttttccgccctgggtgggccaggtgttcctcgccctcgttccagtaaacccacaaccttcagggtgggggtcatggccatcacaaacatgtcacagtgctgcagatattttgtttatggccagttttggggccagtttatggccagatttgggggcctgttcccaacaccagagatttccccaaacagcagatgactttgttagtctcaaggacagactgcctcagcggacctctgctccctgcccacgatcattacccccaaaacatgccggcaagtctctgctccctgcgtcggcagagggatttataagccctctcttataaatcctggtttagcctttgttttgtgactgagtccaccgagatccttgcaggagaagaaaatttgcaggcaaatgaactaaatgtctcttcctgacactccccttctggggggctgaggaagctgtgaacagcctggtttgtcacacagcatgatggccaccacactgaagcagcagcaagcagattcatggaaggtgtgctgagaaccagccacctgggagccctactgtccctgggtatcctctggcttctggctgcaaagctggtctttttttttttttttttcattgatatagggtcttgctttctcacccaggctggagtggtggtgaaatcacggctcactgcagcctcaacctcctggtctcaggcaatcctcccacccaagcctcctgagtagctgggactacaggcggcaccaccatgcctggctaattttttaaaaattatttgtggagacggtttcactatgttgcccaggctggtcttgaactcccgagctccagtgatcctcccacctcggcctcctgaagtgctgggattccacaggtgtgagccactgcacctggctgcaaggctggtcttgactgacaacgtcaggcagtagtccagtcgctaggacagacggatcctgaccctcacactggagtgggtcacaagggcgccatagtgccccacccaggaactcacgtctctcccgtactgctcaaaagatacgtagcggatgcccttgccaaagttggtgaagacgtgggagacctgcagggggaaggggagtgagagggtgagggcctgcgggccccttctcttcctccacttcaacagataggcccaaaggactgaggaggtgccagtcctgcgctagtttgctggggacggagcagtgaataaaaccggaaaaggaccccgccctggtgtcagtgccattctagcagggggcccagacactggagataggtgggggtgaggggccaggggcattctgccaggaaggtggcaggaatgtgagtagagtgagttagcaaaggccccacagaggtgacacctgaaggaggagagggagccgggaggggctctggagggtgtcccaggcagcaggaacggcccgcgcaaaggccctgaggtgggagaatgcctggagctgagtgaggggagaggtaagagaggggtcagggaggtcatgggcagatcatggccttgtgggccacaggaggactttggctttttttttttttccaatttaaaaaagttgagataaaattttcgtaaaacaaactttttatttatttatttatttttgagatggagtctcactctgtcgcccaggctggagtacagtggcatgattttggctcaatgcaacctccacctcgcaggttcaagcgattctcctgtctcagcctcccgagtagctgggattacaggcgcgcaccaccatgcccggctaatttttgtatttttagtagagacgggggttttgccatgttggtcaggctggtcttgaactcctgacctcaggtgatccacccgccatggtcttccaaagtgctgggattacaggtgtgagccactgcgcccagccaaaatttaccattttattttatttatttattttgaggccaagactcgctccatcgcccaggctggagtgcagtggcatgatctcagctcactgcaacctccacctcccccggttcaataaattctcccgcctcagtctccccagaagctgggattacagacgcccatcaccgtgcctggctaatttgtgtatttttagtagagacagggtttcactgtgttggcaggctggtgttgaactcctgccctcaagtgatctgtccgccttgacctcccaaagtgctgagattacaggcatgagccaccacacccggcccaaaattcattttttaaagtgtacaattcagtggtttttagttgattcacgatattatgcagccatcaccactacctaattcccatcaccccaggaaaaaactctgcatccatgagctgtcatttccaagacctccctcccccagcccctggcagtcgccaatcttcttagtgtacatttcatatatgtggaatcatacagtatttgtcatttcatgtctggcctctttcagcatcatgttttcagtttatccacgttgcagtgtgaattcatgcttcatttcttttccgtggctgcataactttggcttttactgtgagatgtagccacaggagcattacaagcagtgagacttctgatctgactcattattattattattattattattatttttagttagcgtctcagtctgttgccctggctggagtgcagtgggaccaactgggctccaaccatcctcccacctcagcctcctgagtagctgagactgcaggtgcaagtcaccatgcccgtctaatttttaatttctttgtagagatggaggtctcgctatattgcccaggctggcctcaaactcctgccctcaagctgtcctcccatcttggcctcctaaagtggtgggattacaggtatgagccactgtgcccagccgaaacatttactttggtaactgaggtgtgaggatcaagacagcatagtcttggtgccagattgggcttgagtccagctctgcactggaccagtcacataacctccctgtctgtgcctctgtttcctcaactctagaatggagataggattttgcttcactgctgcatttccagcacatagagtggtgcccagcacacagtaggtgctcaatcagtgtttgttgaacattaaggggttttgctaatgaaatgaatcgatatgtaagcgtcttgacacagggcttgggatgtaagaagggctcgatacttcttagctgttatgattatagatatccaggagtgacagaagggaaaccgagcagacgagaggctgggcgtgtgtgcctttagcgggtcggggggagctggaagctagtctggacccacctgtcggcagcccctctcagtccactgaaggaccgggtcaggtgaggctgagaacttgaccacttccttttcatacacatccagaaggcggacccggagctggtagacgcagccgcagttctctcgagcgccccacctgccaggcagcagtcagcctctatgcccccgtcacccagccagctctctgggtttcggggcgggaggctgagggctggctccatcttgatgaaggtcctgcacatctggaccacatttggagacgtcctggcctgggaacctctaggggaggagccttggtggttctggggtggaaccagagcctggcggaggagcctgggtggtcctggggaggagccagagcctgggggaggagcctgggtggtcctggggtggagccagagcctgggggaggagcctgggtgaccctggggtggagccagagcctgggggagggtcctgggtggtcctgggggaggagtctgggtggtcctggagtggagccagagcctgggggaggggcctgggtggtcctgggggaggaatctgggtggtcctggggtggagccagagcctcggggaggggcctgggtggtcctgggggaggagtctgggtggtcctggggtggagccagagcaggggaggagcctgggtggtcctgggggaggagcctgggtggtcctggggtggaaccagagcctgggggaggggcctgggtggtcctgggggaggagcctgggtggtcctggggtggaaccagaacctggaggagaagcctgggtgaccctggggtggagccagagcctgggggaggagtctgggtggtcctggggtggagccagagcaggggaggagcctgggtggtcctgggggaggagcctgggtggtcctgcggttgattctggaggcttttgggtaggtagttgggggacgggaaaggatgctctggggaagaaccacaatgcagggcaggtgcctgatgacttcagggaagagccagagccccagggaagagaccagattttctatggaagagccacagcctgaaggaggagctggaatgctttggggcagaacctgggtgttttgggaagaaggcattcatcctaagcctgtaggctctgaagccagtcctgtcccaactatgctccctgagcctcagctcacagggcaccatgctcccaccccttcagagaccctgggcatccacaaggtggtcaggggaggtgtctcgtttcagaggggtatcaagccagtcagtggccccctgtggaccaccccagcctgctgggatgagggtgggcaggagtgcagagtgggggctctggcttctccaaagctctaccttccccggctctgcatcacttcccctctcagcctcatcacaaagggtgcacagtgacagccgctacccgtggggttgatggggcgggaaatgagcccctgttgcagagccgctgccaagcctgctgctgctctggggcagggtgccgctcctcactcaccagtcagccacacagatctcaatctgggcgctgtccagcagctcctgccacaccccttccatcaccaggtccacaagctgcctcttggagcaccatctgggaaggagagatggcagggggcagggcaaacagtcctggcattcaagtcacagtcagaagccacctcctccaagaagtctcccttgataaccctctctaaagcagccctcagggtttgctctagcagacctgaagatgcatgatgggctatacatctctccttggcctcttggagtccctttgccattctccaccctgctgcgggctccaggcagctgacctctatgaaagcctgaccctcatctttgtgggacaggacatgactacaaatgaaggccacatactagacatgtgagcggggagctctgtggcctcctaaagtgtgagggccccgggtctaaagctggacagccttgtctctgtcacccattgcttcctgttggatcagccaatgggatgctccggcaggggatggaagtgaaagaggtgactaaaatcagggtatttatcctcttaggtccttctcaagggactgccttgtcccccaaggaaaaagcaaatctccatggcactctctcctcattttccagtaactgtttcctcccctcacctctagcagtctaggggtggtaacgttcctttcctaactgttactagctcaggggctcctgcctacaactttgtaaacagtccttctcctcaaactagaatgtgccataataacataaattgtgcagtattggtggaaggatgggtaagttgagcaatggaatagaacaaagtgccaggaaccggctgagcgcggtggcttagacctgtaatcccagcactttgagagcccgaggcaggcggatcaccggaggtcgggagttagagacgagcctggtcaatatggtgaaacctcttctctacaaaaaatacaaaaattagccaggcatggtggcgcacctctgtagtcacagctattcgggaggctgaggcaggagaatcattggaacccagggaggcagaggctgcagtgagccaagattgcgccactgcactctagactgggcaacaaaatgagactctatctcaaaaaacaaaaacaaaaacaaaaaaaacagagtgccagggacagacgtaggtatacacagaaacttcataaactgtagaggtggcaccatcattccatggagaacagattctcattttttcttttcttttgagtcaaggtcttattctgttgccaggctggagtgcagtggcatgatcctaggctcactgcaacctcaaactcctgggctcaagagatcctcccacttcggcctcccaaagtgctgggattacagctatgagccaccgtgcccggccttcagtttcctgttataaagtgggggcaataatagtatctatgtcacagggttgttgccagaattatatgtaaagtgtctagtatagagtaactccttgtggaggcaaaagcgactccatcttgggtgctaatctgccatgttccctttttttttttttttgagacagagtctcattctgtcgcccaggctggagtgcagtggtgcaatctcggctcactgcaacatttgcctcctgggttcaagcgattctcctgcctcagcctccacgtccagctaatttttgtctttttagtagagacggggtttccccctgttggccaggctggtctcgcactcctgacctaaagtgatctgcccacctcgggctctcaaagtgctgggattacaggcgagagccaccgtgcccggcccaaaaccctgtctttagatcaaagctgtcttgctgttgtctcacaaactgcaggcgatgatgcacagagcattgctgcctgtggttgctaaccttcctgatctttccttgtatccctggcatatgaaacagtaccctcaacaagtatttgttgattgatggaatgaatcaatgaataaataaatgggggaaggagagggtgaaggtgacgatgaggacagtgtggggggtagggtccctttctttggggcctttgccccagggatcggggcctctcacttgggccactcactcgaaagaggtcacgaagcaggtctgcgaaggagccccaggcaccggtgttaggttcttttctatggcccagccgttcccgccatgctccacctcccagcctctgaagccctctgtgggaaaacaagagttgaacatatggttcacctgccagcctgcccagaagagaccccgcaaccagccagcttgtgctgtccaccagcctctccctcttgtgctccaatcctccctggtttctcctaccgactcctcctcccattattctgtattcctggtcctaccccacaactgtgactctcagcggtgcccatccactcagcttctcttcagccacccttacttgctctttctccttcagtcctgctcttcattgtgtgtgtgagagacagggtctcactctgtcgcccaggctggagtgcagtggctccatcatagctcactgcagcctcaaactcctgggctcaagcgatcctcccacatcagcctccagagtagctaggaccacaggtgcatgccaccacgcctggctaatttaattttttaatttttttttgagatggagtttcaatcttgctgcccaggctggagtgcaatggcatgatctcagcccactgtaacctccgcctcccaggttcaagcaattttcctgcctcagcctcccaagtagctgggattacaggcgtgcaccaccacacctggctaattttgtattttagtagagatggggtttcaccatgttggtcaggctggtcttgaactcctgacctcaagtgatctgccccctcgggcctcccaaagtgctgggattacaggcgtgagccactgcgcctggactaatttttaaattttttagagacagagtctcactttgttgttcaggctggtctcaaactcctggcctcaagcgatcctcccaccatagactcccaaaatgctgggattacaggcgtgagctactgcaccccaccatttttttttttttttgagacaaggtctctgtcacgcaggctgtagtgcaatggcacgatcatagctcactgcagccttgaactccttgggcttaagcgatcctcctgccttggcctcccaaagcgttgccattcccaccgcgcctggcccctgtcctgttctgcatcccctctgcataccaaactacttgctttctcccccggcccagccagggtcttcctgccttgccccgcccactcgttcggattcccggcttcaccttctccagccccgcccaccgggcctaccgcccaggcactgcgtccctcagccccgccccctggctcctccagcggtctcgcccattggctacatctctcagactctgtcccggccccgcccccgcctcgctcgcgcggcccccctcagcctcctgggccccgcccccgtcacccacgctctccgcaggagttgaagatgagattgcggccgaagggcgcgcgcagacagtagcgcgccagggcgcacagcgggaactcctccttgtcttcgttgctgggcaggcagcgttgagccactgcgtagagtgcgcggccctcggcgctgcggtcgcgggccagctgcagcagccacacagtgggcccgtccactatgtcgcgccaggcgcggcacactgggcggcatcgcgtgaccaaggagcgtggcggcacgtggctcagcacctgcaccagcagctccgggggcagcgcgtccagggccagggatgggtccgccggcagccgtcgccgcgatagccgggcgcccatctccagtagccagagtcctgcaggtcgagaggggtcggtaggcgggtcagcgcagccaggccaccccctccctaccttgtcccccagggcgcaaggcccctgctgctcgagagaccccattaggtccatgggcaaccagggacccatttccctctctgatcctaggcctttcccaatcttccccacttgggtaaaagacccctggtctgactctgacccccgtcaggaccgctgatcacggcttccgtctggcgttcaattgtgtcaggctaagcgcttcaggtatatgaccagtgaaatggcaaaagaactaacataactaaccccatttttgtttaaggggactttacccattcctgcacatggctaggttaattttagaccgctgagataatatgcaaaaacagcaatcatgtagtttttaaaactaactctgggattaaagaagtatgtaaacaactatgttttgtcaaagattttttttttttgagacacagtcttgctctgttgcccaggctagagtgtgcagtggcacgatcttggcacattgcaacctccgcttcctgggttcaagcgattctcctgcctcagcctcccgagtagctggaactacaggcgcccgccaccacgcccggctaatttttgtatttttagtagagacggggtttcaccatcttggccaggctggtctcgaactcctgacttcgtgatccacccacttcggcctctcaaagtgctgggattacaggtgtgagccaccacgcccagcctgttttttcaaagatttataggggcattgtgacccaaccaaggacaaagaagtcatcaacctcctcggaccctagctggcactcagatgtctgcagtggtcacctccttatttttattattattacttttttatggagctagaaaccaggactatagcctctacctcctgggctcgagtgatcctcctgcctcagcctcccaagtagctgggactataggtgcatgccactatgcccagctagttttttattttatttattgttttgtagagatggggtctcactacattgccctggctggtcttgaattcctgggttcaagtgatcctcctgcctcagcctcccaaagtgctggaattggtatgagtcactgcgcctggcctgttggtcacctcttgatcacaatgcccttctcttccctctgcccctaaaaaaaaaaaaaattgtactgatttaagatggtactttaggatgatagtccactgtgttctcggtttgctggctctccaaataaacttgcttttcctcccaccaactgtcatctctcttgagtttggctttctatttttttttttttttttgaggcagcctcactctgtcacccaggctggaatgcagtggcccgtctcggctcactgcaacctctgtctcccaggttcaagtgattctcctgcctcagcctcccgagtagctgggactacaggaatgcaccaccacacctggctaatttttgtatctttaaggagagacagtttcaccatgttggccatgctagtctcgaactccagacctcaggtgatccacccacctcggcctcccgaagtgctgggattataggcttgagccaccacgctcggcccgagtttggctttcttttctgaaaccgagtcttactctgttgcccaggctggagtgcagtggcacaatcttggctcactgcgacctccgcctcccgggttcaagcgattctcctgcctcagcctcccaagtagctggaattacagatgtgtgccaccacaccgagccagtaatttctgtagtagagatggggtttcaccatgttagccggctggtctcaaactcctgacctcaagtgatccacctgtctcagcttcccaaaatgctgggatttcaggcgtgagccaccacgcctggcctgagtttggcttttgagtgttgagcggccaaacctcagtcgggttacagacccacaaggaaacccactgcggaagaaaccatttctaccccataccccaatgtgtgccagctactgtgacctttggaacccatgacccatcttcaacaaaatctcttcttgcctcagttacttctctgaacattcctaccaccttcttgctctaactggaacccagctctcctgtgggccttccaagtggggaggtctccgtgctcctgggagctacttcctgaccattctccctccaccctccccaaaacccccagcgatgaatctcatcactaccttgcttcatgcgtcatctgctgacccagatcatgactcctctcttctccctaattttagctctgggctcacggccgctcccgctgctcttagcatcattctcagtgatttctataaccagatagttcttccgcagccccaacctctctgttccctgacctctctctagtgactttttccttccccaacatctccctctcgtggtcaaacccagaccttgtttgaataacagcagcctcttcagaacctcaatctcacactcactctccacccatcactttttctttccacctcattccctccagtgccccactcgcatgatccttccaacccactgtgatctcccatccgttgtccctttcatattttactccccctcaccctcccatgccctcatttcttccttagccagcttaaattccatggttaatcattaaaaacattcttgacctggcacgctggctcatgcctgtaattccagcactttgggagggcaaggtgggaggactgcttgaggccaggagtttgagatcagcctgggcaacacagcgatactccacctgtacaaaaaataaaatgaaaaaattagccgggtgtggtggtgcacacctgtagtcccacctactccagaggttaaggtgggatgatcgctggagcccgggagttggaggctgcagtgagctatgattatgccactgtactccagcctgggcaacaaagcgagaccctgtctctaaataaaataaaaagaatagcaaaaaaagtggggctgtagctagaaggggaggtgaagtcaagagagggtttgggctgggcacggtagctcacacctgtaatcccagcactttgggaggctgaggtgggcagatcacttgaggtcagtagtttgagaccagcctggctaacatagtgaaaccccatctctactaaaaatacaaaaattagctgggtgtggtggcgcacctgtaatcccagctactcgggaggccaaggcaggagaattgcttgaacccaggaggcagaggttgcaatgagctgagatcgcaccactgcactccagcctgggcggcaaagtgagaccctgtctcaaaacaaaacaaaaacaaaaacaaaaaaagagagagggtttgttttgagatgggagacaggatgctgtgtgggctaacaggagatccagtgcatgggggaaactgaatgagcagcagagagaggtgagaaccagggacggtggctggaagtgggcgggaaggtgggagcaggtgatgggacagtcacagcaggagaacgggtgtgggcaagggtgcaggtaggtggtagaggcgggggtggctgtggaagttcacttctcatctcttgcattttctctgcaaaataagaagccaagggagagtgaaagggggggaggaggtgttggaaaggattagaggagaagggaaaaggtgtgaattagttgtctagaagacaggaggaaggaggggatcagagaaatgtcatatggctgccaggcagcattggggtccgcctgagggtcaagttcacagacttgaaattagcctggccagggggctgtgttgttttttagctcactcaagctgtgtgggtgcaggcacggcagagaggaaggctggatttaaccagggtctcatgcaggaggaagccaaagtgggcaagggtgtgtgcagagaatgtgttattttttatttatttacttttttgagatggagtctcgatctgtggcctaggctggagtgcagtggcgcgatttcagctcactgcaacctccacctcctgggttcaagcgattctcctacctcagcctcccaagtagctgggattacaggcctctgccaccacgcctggctaatttttatatttttagtagagacagggtttcaccatgttggccaggctggtctcgaactcccgaactcaggtaatccacctgcctcagcctcccaaagtgctaggattacaggtgtgagccactgcgccgggccgagaatgtgttttttttttttttttttgagacagagtttcactcttgttgcccaggctggagtgcagtggcgcgatctcagctcactgcagccttcacctcccaggtttaagcaattctcctgcctcagcctcctgagtagctgggattataggcgcccgccaccacacctggctaatttttatatttttagtagagacagggtttcaccatgttggccaggctgttctcaaactcctgacctcaggtgatccgcccacctcagcctcccaaggtgttgggattaacaggcgtgagccactgcgcctgccctgacaatgtgttattttattattattattattattattattattattattattattattattatttttgagacggagtcttgctctgttgcccagcctggaatgcagtggtgcgatgtcggctcactgcaagctccgcctcctgggttcacgccattctcctgcctcagcctcccgggtaactgagactacaggcgcccaccaccatgcccagctaatttttttgtatttttagtagagacggggtttcaccatgttagccaggatggtctcgatctcctgacctcatgatccgcccgccttggcctcccaaagtgctgggatcacaggcgtgagccactgcaactggccttttatttttatttttgagacagggtcttgcttcttcactcgggtgggagtgcagtggtgtgatcatggctcactgcagcctcaacctcccaggctcaagtgatcctcccacctcagcctcccaaactgctgggattagaggcatgagtcaccgcatgcagcgtctttgtttctctttgtggtaaaacttctcaaaagagctgtctacccagtattttctgcttccattctttctaaaacattttctttctttctttttttttttttttttgagacagagtctccctctgtcacccagactggagtgcagtggcacaatctcagctcactgcaacctctggctcccaggttcaagtgattctcgtgcctcagcctcctgattagctgggactacaggtgcgtgccaccaggccctgcttatttttgtatcgttagtagagacagggtttcaccatgttgcccaggctggtcttaaactcttgggctcaaaggatcctgctgccttggcctcccaaagtgctgggattataggtgtgagccactgtgctcggctccagctccacttcttgctataaattatatgaccaatggcaagtcacttaatctctttatacctcagtttccctttctgaaaatggggctgctaacggtgcctccatcatagggctgttgtgaggatgaaatgagtattttaaagcacttaggaaaagcccctgtaggctcctaaataagagtgatattaatttaatattagtccaggcatggtggctcacacctgtaatcccagcactttgggaggcttaggtgagcggatcacctgaggtcgggagttcaagaccagcctgggcaacatggcgaaaccccatctctacaaaaaatacaaaaagtagcggagcgtggtggtgggcacctgtaatcccagctactcaggaggctgaggcaggagaatcacttgaacccgggaggtggaggttgcagtgagctgagatcgtgcctctgcactccagcctgggcgatagactgagactctgtctcaaaaaaaaaaaaaaaagatgatgtcaggaatttttgctacattcatggactacttgcctgacacaggcttatttcttttttttaagtaaaaccttaatttgtttaaaaatgacaatagctgacatgaattgagcacttattgggcacatgaagataacaagcattagatcattaaagcctcttaaccaagggcatcctcaaaggagagttttgcccattaaacaagatgatagaattcatgagctgatccagcttaaatgctcagcaccgtggcttaataagggccaataaatgccactaaatgaaaatgtcacagctaaaatagttgctgtcagccaggcacagtggctcatgcctgtaatcccagcattttgggaggcggaggtgggtggatcacttgaggtcaggagttcaagaccagcctggccaacatggtgaaacctgtctctactaaaaatacaaaaattagccaggcatggtggtgggagcctgtaatcccagctactcaggaggctgaggcagcagaatcgcttgaacctgggaggtggaggttgcagtgagccaagatcatgccactgcacacagcgagactctgcctcaaaataaataaataaataaaatagttgctgtcactttttaaaaatgatgtgtcataataatggcaactaacataatttagtgtttcacattaatttttaaaatattaatattaattttcacaggtgtgagccaccatgcccagcctctgacatcatctttattcctaccgcagaaagaatgaagctgtggagacagactttacaaagaccaagctgtgcttttctccaggtggttctgagttgcattaatagttcactgaggcccggcgcttgaacccgcgaggtggaggttgcagcgagcagagatcacatcactcactgcacttcagcctgggtgacagagcgactctgtctcaaaaataaataaataaattccctaggtttataaacaagtctaccagtctgcctggcatgggtgtgatgtgcaccagagtttagtttcctggagttcttcttaggaggagttcttagttcccactcttcttcttttttgtttttttgagacggagtctcactctgtcgcccaggctggagtgcagttgcatgatctcggctcactgcaacctccgcctcccgggttcaagcgattctctgcctcagcctcccgggtagctgggattacaggcacctgccaccacgcctggctaacttttgtatttttagtagagacagggtttcaccatgttggccaggctggtcttgaatgcctgaccttgtgatccgcccgcctaggcctcccaaagtgctgggattacagacttgagccactgcgcccggcagttcctgttcttcttaggagtgtgttcccactggcaaaaggaggatctctggggctaggggtaggcccctcgcccaacaagggcagccagacttcaccaaggagcagagatgttcaagaaatgtactgaatgagccctcagctatccacacaaaccatattaaatgcttgtatggggccccagtgtggtggcttacgcctgtaattccagcactttgggaggtggaggcgggaggattgcttgagcccaggagtccaagaccagcctaggcaacatgacgaaaccctctctctacaaaagaaatacaaaaaaattagtcaggcatagtgtcatgcacctgtagtcccagctacttgggagctgaggggagaaggatcacctgagccagggaggttgaggctgtggtgaatcgtgaaggggccactgtattccagcccaggcaatagagtgagatcctgcctcaaaaaaaaaaaaaaaaaagtttgtggccagtcacagtggctcatgcctgtaatctcagcactttgggagaccaaggtgggtggatcacctgaggttaggggtttgagagcagcctagccaacatggtgaaacccgtctctactaaaaatacaaaattagccaggtgtggtggcatgctcctgtagtcccagctacttgggagactagtgggagaatcccttgaacccaggaggtggagattgtggtaagctgagattgtgccactgcactctagcctgggcaacaagagtgaaactgtctcaaaaaaaaaaaaaaaaaaaaaaggaaagaggaaagaaacacgaaaagtggctcaacagtcaaagacaggcttattttggagaataagcctgagaggggcttctggccaattttgggaaaggttgaaaagtacccactgcaagattgaatgccaactactagctgggtcacaataggacaagtagggcctagtattgcctgcttccagggtttttgggagagtgtgtgtttggaggaaggttactggctgtcagagtgaccggggaatgctattggtactcagctacccaaagggacccaggatgctactacagcagactgtatttttcaaaagtggctatgagaacatttcctatctgacacgctttttcagttcaccactgctcgtgaagctgtggggtccacattcctcccctgggcacgtgcaggcttttgcaactgcctcaactttcagagcactgcagaagggacattgctaagggatttcattctctctctctttctctctctttttaagagacaaagtctcactctgtcgcctggttggagtgtagtggcgtgattatggctcactgaagcctcgaactcctgggctcaagcgatcctcccaactcagcctcctgagtagatgggactgcagacacatgccaccatgcccagcttcgtttgttttatattttttttttctagaagtgaggggtctccctatgttgcccaggctggtctcttcctgggctcaagtgatcctgtcgccttggcctcccaaagtgctgggattataggtaggagccactgtgcccggcctgctaagggatttctgaggctggatcataaaagagtatgcagcctctgcctgtctttctttctttctttctttctttttttttttttgagacagagtcttcctctgttgcccaggctggagtgcaatggcccaatctcggcccactgcaatctccacctcctggattcaagcaattgtcctgcctcagcctccagagtagctgggattacaggcacacgccaccatgcctagctaatttttgtatttttttttttttagtagagacgggatttcaccatgttggccaggctggtctcgaactcttgaccttgtgatcagcccaccttggcctcccaaagtgctgggattcattaggctgtgcaatttgtgcactttctataaaaggtttgctaaaaatgagctgggtaccatggcttatgcatgtcatcccagcactttgggaggctgaggtgggaggatcgcttgaacccgggggttcgagaccagcctgggcaacacagtgaaaccccatctctaaaaaagtaaacattaaaaaattagctggacctggtggtgtacacttgtagtaccacatactcgggaggctgaggtgagaggattgcttgtggccaggagttcaagggtacagtgagctatgattgcactactgcattccagcctgggtgacagagtgagactctgtctccaaaaacaaacaaataaaaaacaccaccaccactaccaaaacagaacacatacccaaaaccctcaacgtttgctaaaaatgatgaaaacaagaaaaacagatatggcagtccatggaaaggaacaaaaagatgtccaaaaactttcctcaaagccatcaaacaaaagatgttactattttaaaatagaagaatctgtgaaaatgattaagagttagcttataagtatctcctcagcagattctcaaattgtatagtttttttgaggccagagacctttttatactgactggaaaattctgcacaaaaaatacctctgtgaatcatgataccagtttgtttttggtctgtccagagtataattttgccagagtatatttataataagccattattccttttttttttttatggctctggggactgggatcagctatgcggtcctcacttagggaacttgtgcctttgccgtcagatggtggatggggctgggtcatctgaggcttcttccatcctagtctagcagctgaagtgaggagacccgaacagctggcgctccttagacatttctctctattttcacctggtctgtccagctactttcggaaacaaaccaaataatatcttttttttgagacagagtctcgctctgtcccccaggctagagtgcagtggcacgatctcggctcactgtaacctccgcctcccagattcaagggattctcctgcctcagcctctcgagtagctgggattacaggtgcgtgccacccacaccggctaatttttgtatttttagtgaagacagggtttcacatgttggccaggctggtcttgaactcctgacctcaggtgaaccacctgcctcggcctcccaaagtgctgggactacaggcatgagcccctgcacccggccactttttttttttttttgatatggagtcttgctctgtcgcccaggctggagtgcaacggcatgatctccgctcactgcaacctccgcctcccaagttcaagcaattctcctgcctcagccttctgagtaactgggatcacaggtgcgcaccaccacgccaggctgattttttgtatttttagtagagacggggtttcactgtgttggccagtctggtctcgaactcctgacctcaagtgatcctcccgccttggcctcctaaagtgttgggattacaggcgtgagccactgcgcatggcccagataatatactttcatcttcaaggttcattgtattgaacgggttttactaacacagcagcagcctcaattaactgtgttcattttataaagtattatttttactttattagttaagttttattaattgtatctgtttaaaatgtagcaattttatttcaattgattttaaatctttttttttttgagatggcgtcttactctgtcacccaggctggagtgcagtagcatgatctcagctcactgcaatctcttcctcccaagttcaagcaatccttccgcctcagcttcccaagtagctgagattacaagcgtgcgccaccacacccagctaatttttatattttcagtagtgatgggatttcacatgttagctaggctggtctcaaactcctgacctcaggtgatccacccaactcggcctcccaaagtgctgcgattacaggtgtgagccaccgctcccagccgatatggaacatttctattgccccaaaaggtttatcccttcccagccaacctccctactcccacccaaagtcaactactattctgttttgttttgttttgtttttgagacgtagtattgctctgtcctccaggctggagtgcaggggcgcgatttcggctcactgcaacctccgccttccgggttcaagagattttttctacttcagcctccggagtagctgggattacaggtgcgcaccaccacacccggctaatttctgtatttttagtagagacagggtttcaccatgttggccaggctggtcttgaactcctgagctcaagtgatccgcctgcgtcggcctcccaaagtgctgggattacaggcgtgagccaccgtgcccggcttctttctgttactataaattcaatttttcttttctataatttcacgtaaatggaatcatatagagtgtcggctatcaacctacgacctcattgttctaagctgcgaaactggagtttggttctagcccacccagggacgctgttaaaaaaaaaaaaaaaaaaaaaagctccgggaacggtggcttacgcctgcctcctgcctggacaagaagagcgaaacttcgtctcaaaaaaaaaaaataaaaaaaaataaataataattggagtttggccctttaaatcttcttcctttgctgactgacatgatgctaagtttttttcagtagagggcgctggagagacgttgtaggaggaaagggtttggcttccagtttccagacttggctcctgcagggcagctactcctgcagcgagcatgcttctccagcctctgactcctacatgcgtgcggtttctttagtgtcaggaagtttctctggcacatggctcctgaaatatggcagtcagcagcacccacctcagctgagacacttccctgtcagctgctctccccaccatcttactgaatggacttctgccgcattctactggtgccgcaccatagggatgcctttgtccttcggtgagccatggccaagactactccagcaaggtcggggtctcagcctggggctctcatctttctcgggctatcttagacttaggaggagtggctgctccttgtatctgctatttctttctttcttttttctttttctttccttttttttttgagatggagtctctctctgtcacccaggctggagtgcagtggcaagatctcggctcaccgcaacctctgcctcctgggttcaaactattctcctgcctcagcctccttgagtagctgggactacaggcacacgccaccacgcccagctactttttgtagtagggacggggtttcaccatgttggccaggatggtctcgatctcttgacctcgtgatccacctgccttgcctcccaaagtgctgggattacaggtgtgagccattgtgcccagtctatttctacattcgttagcattctctttatttcttagtaaccagttcctcttactcaaatcccctatcatagttaacaattctgtatattaaacaatcgctgtttaaattactgtgtggtttgtctcctggttggatcctgactgatacacacagtatgtgtctccttgtgaagaagtcatctgggccaggcacagtggctcatgcctgtaatattccttgagttgtaggcatggcttagggttatttgtcctctccttcagcataatgtccgtgtgattcactcatactttttttttttttttgaggcagggtctcactctgttgcccaggctggagggcagtggcgccatcatagctcactgctgccatgacctcccaggctcaagcaatcctcccatctcagcctcccaagtagctgggaccacaggtgcaccccaccatgcctggctaatttttaaattttttttgagacagggtcttgctatgttgcccaggctagccttgaactcctgggctcagcgatcttcccagcttggcctcccaaattgctgggattacaggcatgagccaccgcgcttggcccatccacttgttgtgtatcaatcagtagtctattcctttttattgctgggtaatagtccactgaacacataatctacaacctgtttatccactcagtatgatggacatttgggttgtttccagcttaggggtattatgaataaggctgctatgaatattcatgtacaagtgtttgtgtggacatatgttttctttgctttttttttttggagacagagtcttgttctatcaccaaggctggagtgcagtggtgcaatctcggctcactgcaacatccacctcccgggttcaagcagttctcctgcctcagcctcccaagtagctgggattacaggtgtgcgccaccacacctagttaatttttgtatttttagtagagacagggtttcaccatgttggccaggctggtctcaaacacctgacctcaagtgatctgcctgcctcggcttcccaaagtgctgggattgtaagagtgagccatcgtgtccagccattttcattgctcttgagtagatacttaggagtagaatttttgagtcacatggcaggtgtatatttaacgttacaagaaaatgcccagcagttttccagcatgattgtgccatctgcattcccaaaaattctatatgcattgcagttgccagcacctggtattggtattgtcaatcttataaaaagtttacacagaatggtttccttttcataccttcaggatactttcctctacccgattctcccttattaatttttgtttgtttgtttgagacggagtctcaccctgtcacccaggctggagtgcagtggcgtgatctcggctcactgcaacctctgcctcccaggttcaagcgattctcctgcctcagcctcccatcccttattaatttttaactattttagccaggcatggtggcttatgcctgtaatcccaacattttgggagaatgaggcagggggattgcttgaggccaggagttccagaccagcctgggcaacatagcaagacctccatctctacaaaatataaaattaaccagacatggttgcaagcgcctgtagtcccagctactcgggaggctgaggtgggaggagtgcttgagctcaggaggtggaggctgcagtgaactatgatcacaccactgtgctccagcctgggtgacagagtgagaccccatttcaaagaaaaaaagaaaagaaaaaaaaattgcatgcagcccctgggaagtgtggatgctgctggtgttactgagtaaagccctccccatctggcatccgggagtgagctcccagcacaaagactgtttttgtccctgctaacatgaacaagtgctgtccacagaacacagagttcacagtcatccatccaacttgaccaagaggccagtgggaaaggactgtatttataacagccccaaatgtcataccagtgacttaaaaacaagcaaacaaaaaaccacagtcacccagcctcttgtttgaaaaagtggcgggatagcaaggaccatcagatgtttaagaaaactagcagcctgaaagagaaacatttaagtaaacaagcagaaggaaagtgaactgaccccagaggaaacagacaattcacaggaccaaaagaacatggaggaaaagaaaaaaccctaactggtacactcaggactggcttcatgggcatgcaacctgtgcgttcacatgtggcccaccctcttttcaatgctccactgtggccatctcaacattctttttcttttcttttttttttttgagatggagtctctctctgtcgcccaggctggagtgcatgacacaatctcagctcactgcaacctccgcctcctgggttcaagtgattctcgtgcctcagcctcctgagtaactgggactacaggcgcccaccaccacatctggctaattttagtatttttatttttatttatttttgagatggagttttgctcttgttgcccaggctggagtgcaacagaatgatctcagctcactgcaatctccacctcctgggttcaagcggttctccagcctcagcctcctgagtagctgggattacaggcacgaaccaccaagccaggctaatttttgtatttttagtagagacgaggtttcgccatgttggccaggctggtcttgaactcctgacctcaggtgatccacccacctcagcctcccaaagtgctgggattacaggcatgagccaccattcccagctaatttttatatttttagtagagacggggtttcaccatgttgggcaggctggtcttgaactcctgaccccaggcaatctgcccacctcagcctctcaaaatgctggaattacaggcatgagccgttgctcccagcctcaacattctttttatttatttatttttatttatttatttattttttgagatggagtcttactctgtcacccaggcaggagtgcagtggcgtgatcttggctcactgcaacctccacttctgggttcaagcgattctcctgtctcagccttccgagtagctgggactacaggtgcgcactaccacgcccggctaatttttgtatttttagttgagacagggtttcaccatgttagtcaggctggtctcgaactcctgacctcaggtgatccacccacctcggcttcccaaagtgctgggattacaggcatgagccaccatgcccggccaacattctcttaaattaaaaattttgtgtgtgtgtgtgtgtgtgtgtgtgtggagatggggtctcactatgttgcccaggttggtctcaaactcctggcctcaaatgattctcccgtctcagcctcccaaagtgctaggattacaggcctcagccaccgagcctggcctcaacattcttaattatttctgaacaagggaccttgcattttcattttgcaatgggccatgcaaattatgtagctagtcctgggaacacttagatttgcaaagatgttctaaacagagtaagaacaggatactataaaaggaagaatgtctacaagaagaaaaagaaatccaaagaaatggattggatgagttactaacagaaaaacgcctctttcaaaatggaaaaattaaagctatgagaaattctaggaaaaacataaaactgtatctgtgttacagctatttgataaagttcacaaaaaaggaatccttttgacctggaggctaggggcattctctttacattggctttacttacgggttttcttgggaaaaagactcttttcaacaaatggtgctgggacaactggaaatctatatgcaaaaagatgaatttagactattacctcataccagaatcaacatgaaattaatcatacatctaaatttaagagttaaaactataaaactttgagaagaaaacaggagaaaatctcatgatcttgtgttaagcagagattttttagatccaacaccaaaaactatgattcataaaagaaaaactggataaattagacattatcataagttaaaacttttgtacttgcacattatatatctgataaagcacttgtgtatagaatatataaataactcataaaactcaatgagataaaccagttaaaaaatggacaaaaggccgggcacagtggctcacgcctgtaatcccagcactttgggaggctgaggcaggtggatcacctgaggtcaggagttcaagaccagcctggccaacatggtgaaaccctgtctctactaaaaatacaaaaaattagcctgtaatcctagctacacaagaggctgaggccggagaatcgcttgaacctgggaggcagaggttgcagtgagctgagatcacgccatcgcactccagcctgggcaacaagagtgaaactccatctcaaaaaaataaaaataaaaaagaaagaaagacaaaagatttgagtagacatttcaccaaagaacatatacaaatgagtaatgagcacatgaaatgatgctccacttcattagtcattaggaaaatgcaatttttttttttttttgagatatggtcttctctgttgctcaggctggagtgcagtggcacgatcttggctcactgcagcctcaacctcctgggctcaagtgagtctcccatttcagcctcccaagtagctgggactacagatgcacccaccaccacattcagctaattgttgaattttctatagagatgggtcttcctatattgcccaggctggtcttgaactcctgggatcaagggatcctccttccttgacctctcaaagtgctgggattatgggcatgagccaccatgcccagctgggaaatgccaattaaattcacaatgagacaccacttcatacccactaccctggctattactcaaactgacgatactgacaggtgtagtcgaggatataaagaaactggaaccctcaggcatcgctggtggggatgtaagatgtacagctaacctggaaaaccattaggcagtttctttaaaagttgaggccaggctcggtggctcatacctgtaatcccagcactttgggagtcctgaggtcaagagttcgagaccagcctggccaacatggtgaaaccctgtctctactaaaaacacaaaaactagccgggtatggtggtaggcgcctgtaatcccagatactcgggaggctaaggcaggagaatcacttgaacctgggaggtggaggttgcagtgagccaagactgtaccactgcactctagcctgggcaacagagcaagactctgtctccaaaaaaaaaagttgaacatggctgggtgcagtggctcatgcctgtaatgtcagcactttgggaggccgaggtaggaggatcccctgagtccaggagttccaggctgcagtgagctatgaatgcgccaccaccctccagcttgggagacagaataagagcctgtctctaaaaaaaaaaaaaaattaaaaaaaaagttaaacataaacttatatgaaacctagcaattctacgactagattatctacccaagagaaatgaaaatacaccttctacctccatgcaaactctcatatgctaatgttcatagcagctttatacatttggaaacactccaaatgtctattagctgatgaatggatatataaaatgtgccatgtccacaaaatagaatatttttaagcagtaaaaaggaataaacatgctatagtatgaataaactccaaagcaatatgctacatgaaagaggccagatgcaaaaggacacatattatatgatgtgcttctatgaaatgaccagaaaagacaaatctttttgatcagaaagtagattagtagttgccttgggctaggctgggaacagagtgactacaaataggcacaagggatattttgggggtgatgaacatgctttgttacggtggtgatggttgcacaactctgtaaagtcactaaaagccacaaagttgtccactttaacagggctgaattttttggtatgtaaattacacctcaaaaaagctgattaaaaaaacacagcaaactttgcaattaaagcatgtagggcttaaatatggaaacagaacagactgtagatgtttccaccttgacaatgtaaaagcaaatgtacagctgggtgcgatggctcacacctgtaatcccagcactttgggaggctaaggtgggatgatcgcttgagcccacgagttcaagacgagcctgggcaacatagtgagacccccgtctctacaaaaaaattagcagggcatggtggcgtgtgtgtgtagtcccagttattagagaggctgaggtgggaggatcgcttgagcccagaagttgaggctacagtgagccaagatcccgccactgcactccagcctgggtgacagagactccatctccaaaaaaaaaaaaaaagaaagaaaagaaaaaagaaaatgagcaaacacaaaacagtgcaatgttactgcaattcactaaaaatactatcaaagagaactcccatacattcctggtggaatccatttggaatcactttggaaaccactgggcttttttttttttttttttttttttttgagactgaatctcactctatcgcccaggctggagtgcagtggcatgatctcgactcactgcaacctccaccttctgggttcaagtgattcttgtgcctcagactcccaggtagctgggattacagctactctgccaccatgctctgctaatttttgtatttttagtagagacagggtttcaccacgttggccaggctggtctcaacctcctgagctcaagtgatcctcctgccttggcttcccgaagtgctgggattataggcatgagccattgtgcctggcccactggacattttttactgaagtaaaaatgaaaatgtgcctgccccatgacccagcaactccaccccagagccagaaaacacatacaagaatattcatggtggtggtgttcctaacagcttcagattggaaaagtcccagatgcctgtccactgtagcacatacaaataagtcattaataagataagatggactactatatagcacaataatacaaatattgcaaatacaaatattataaataatacaaatacaaaataaggaataagccacaagtacccagaacatgaatgattatcaaaagcaaaaaaaaaaaaaaatttttttttgagacagggtctcactgtgttgcccaggctggagtgcatggccacgatcatagctcactgcagcctccaatttctggactaaatcgatcctcctgactcagcctcttctggacctgggaccacaggcacacaccaccatgcctggctaatttttgtgtttttagtagagatggggtttcaccatgttggccaggctggtctagaactcctgacctcaaatgatctgcccacctcagcctcccaaagtgctgggattataggcgtgagccaccacggctggccctttctctcttcgtgtgtgaggatgtcccctctgcaagatgggaaatatgcaggtccacatctgtcatccacaatctacatgttcaaaagctcagaaaaccaacagtttttcccagacccatttggtggcaggagctgacttgagctgtcatgaggttttgtatagtctttagttactcccctgagaatgaacgtgcatttcactgaaggcctattagtgtttgattacacaaatgctcctcagccctactaggggacttatgtaacataccaaatgggctccgtatgacttgcttaatattcaaagtctaggctgggcatggtgactcacgcctataatcccagcactttgggaggtcaaggcaggcagatcacttgaggtcaggagttcgagaccagcctggtcaacatagtgaaacccatctctactaaaatacaaaaatgagctgggtgtggtggtgcatgcctataatcacagctacttgggaggctgaggcaggagaatggcttgaacctgggaggtggaggtggcagtcagccaagatcacaacactgcactccagcctgggtgacaaaggagagtccatctcaaaaaaaaaaaaaaaaaattcaaagtctagactcccaaatgcatctggccccaagagctttggatcagagatgatggacctctaataacccctgcccctcacggttgtagggaaatttcatgagatcagggtctggccctcgacaaatgtttgctgccactgtgaggagttactatgattagcagcaaacacccagctatgggattggaggagtccacgtgggcacctccatatgctgccatcagagactagaagaatgtgggataaggacagacacgcttaggaaaaaacaaggcgaaacacagcaggacaaaaactgaacctctggcacgatcattcgttgaatttgcaaaaggaaaaagaaaataccaagttccaaatctatccctagaaaaatgggtggtgactgggtgctgtggctcacgcttgtaatcccagcactttgagaggccaaggcaggaggatggcttgagcccaagagtttaagaccagcttgggtaacatagtgagacccctgtctctacaaacaaaatttaacaattagccaggcatggtggtgtgcacttgtggtcccagctactcgggaggctgaagtgggaggatcacttgagcccaggaagttgaggctgcagtgagccaagactgtgccactgcactccagcctgggtgagagtgaaaccctgtgccaattaaaaaaaaaaaaagaagaaaagaaaaagggcccagctgcagcagttatgttgacagtgttagtcataggtgaacaggctataatagttaaggagatgccttcacagaatactaacagctactgttaactgagcacttactttgctctaggcatgtgggaattgctttacaaaatctcacagaagcctcaaaccaccccatgaagtaggcacatggggaaactgaggcttggaggatgacagcaacgtgcccaaggtcacccaacaaagaagcaacagagccatgtcaaaagacaaaattacaacaaatttagttatagatctaatgggcttttattcaagattcttgaatggggcagcctccattttacaaaacagactgagacccccactgggtagtaagagaatggtgggttttataagctgggaccaagggaaaagaatgatagaaaaaaacaaacaaaaaaactaggccgggagcagtggctcactcacacctgttatccccagcactctgggaggccaaggcaggtggatcacctgaggtcaggagttcgagaccagcctggccaacatgatgaaaccccatctctactaaaaatataaaaattagctgggtgtggtggcacgcacctgtaatcccagctactcaggaagctgaggcaggagaattgcttgaacccaggaggtcaaggttgcagtgagctgtgattgtgccactgcactgcagcctgggcgacagagtgagaccccatctcaaagaaaaaaaaaaaaaacctgctgggatttgaatcttggtatattggactccatagtttgtgctactgtatacatgtcttctgtctctttctttgtttcaaaataatcttactttattttctcccaatttttactatgaaatttcattctatagacaagttgaaagagtaatcaaatgaacatcactatctgctccatattttgccatatttgcactctctcttttctttttggacagagttttgctcttgtcgcccaggctggggtgcaatggcgcgatctcggctcactgcaagctccacctcctgggttcaagctattctcccgcctcagcctcctaagtagctgggattacaggtacccgccatcatgccctgctaaatttttatttttgtcgagacagggtttcaacatgttggccaggctggtctcgaactcctcagcctcccaaagtgctggcattacaggcataagtcaccggcctggcggccttgatgaactactcttcagtacttcctaatgaatctcctaagattaagggcaacctggccaggcgtggtggctcacgcttgtaattccagcactttgggaggccaacgcgggtggatcacgaggtcaggagttcgagaccaggctgaccaacacggtgaaaccccatctctactaaaaatacaaaaaaattagccaggcgtggtggcacatgcttgtaatcccagctactagggaggctgaggcaggagaatcgcttgaacccaggaggtggaggttgcagtgagccgagattgtgccactgcactccagcctgggcgacagagagagattctgcctcaaaaattcattctgccatcaatacccactccgtgaacaatttcccctgctgtctctagcaggtcttctgtggctgtttcctcctaacaagatccccgtgggggctcaaacaccagtgggggtggcaggtctcactcatctcttttaatctaaaacacttcgttttccattcttctaaaagagattacatacttttattatagaaaaaattaaggcaaacttttctatttgatttctaagccatatgtagaatttgattagaattgaagaaattaatatttacataaatacaaaaatgttattttaaaaatatatctttttgtttgggcgccggtggctcacacctgtaatcccaggacttttgatggccaagacgagcagatggcttgagcccaggagttcgagaccagcctgggtaacacggcaaaaccccgtatccacaaaaaataaaaaaattagtggggtttggtgggggggcgtgcacctgtagccctagttactcaggaggctgaggtgggaggatctcttgagcccaggaggttgaggctgcagtgagccatgattacgacactgtactccagcctgggcaacacagttttgatttgatttgatttgatttgagacagggtctcaaatatatatgtgtatatatatatatacatatatatatatacacatatatatacacacatatatatatgtacatatatagtttttttttttttgagacagagtcttgctcttgtcacccaggctggagtgcaatggcacaatcttggctcactgcaacctccacctccagggttcaagcgattctccttcctcagcctcctgagtagctgggattacaggcgcctaccaccacgcctggctaatttttgtacttttagtagagacggggttcatgttggccaggctggtcttgaattcctgacctcaggtgatccgcccgcctcggcctcccagagtgctgggattacaagcgtgagccaccgcgcacgcccggcctaaaaatatattttttaaaaagaagctccttagccaagccttacaaaaagagagtcaacagatactaggtatatttaatggaacaataaatacaagttaaaaaaattattttatgttagaaaagtagccaatagagaagccgaaagtaatgtcctgactatacagggaggtgattatatagggaggaggaaaaccacggagatgatcaaagttgtctcctatttttagcaagggatccatggacgcgttgtctaaaagttgatgaaataagaaataacaatccaaaaatatgctgtaaagatttggaaatagataccagaggaataaaaagtggaaaaagttaaaaacgaggcaccagcgatcacgagttacttcttgccatttttgaaaagtaatgtagttaacaaaaaaatgtatttggccgacaggggttgggggcggtggtgagggagaggttgttgtttaaaggcgtgttgttttccatgcaaagctctgtcctgtcctacgtgtctgagtgtcgtgtattactggaacatttttaaagaagtattatttattttacaactagactcccataatatttgtctttcaaaatatggagtaaatagacgctgtctaaagttgaagaggcagtatacagagctttcgaacatatcactgaacattgcaaaagtaacttggcagaacaaaatttaaattgagggttggggccgcagcgaaacacataatgtgcccaagttgctaaatcgagaaaccgccctccaaggcttctgattcacagattctgcgaagggactgacggccagaagacagaaaatccagcaacggtaaaaagcggcctggccttccccgggctgttgcgcccacgtgttggtttgcagcgtttggcaggggttttggatggtggcctccgcggacgagcgcagggatggagaggcctgggcgttcgaacacccacgttcaaagcaaagcccttccagatttagggctttctaacgtgcatttgtataactttgggtttaaaggagcctcaggccgagggagggcccgggaaagcgacgctgcgggttatgggactcccagggacccgcccctccgggcagggcctggcgcgggaatccttcccggggcgccccagctgtgggcgagaacgggactgacgcttgggtcccgacctgggtcccctacctgtcccggcgctcacctggcgggctgctcggaggcggcagcggcgggctaagcttccctttcccactttgttctgggaggcagtcgaggggctccccgtgatcggcgtggcccagggggccccgggaccggcggtctgggcggtcggtcctctcccggggcgtggcggctgcagcccggcgccgggggcggcgactctgagatccagcgggcgggggcgggaggccgcccctcctccggctgcggggcccagcgggagcgagggcgggcgggcgggggagcttggagggctgcgtgcagcgagggggaggcccagttgccgcgaggccagcggggagcggggccagccccgcgcccctaggatccggggcccacccctgggagagccacctcctctgggtgtgcgagttccacatccccaagacgcccccgcggggggactggtcctagctccccacccccacccaaattccgtttccttctggtcctggcctcctgcttgcggccgtctccacccctcacatccatgggatcctgcacaggtccacggttggtaaaccgcttagctgtgagcccgacccagggcctgattcgaaacacttggatcaaagtccctggccacagggattttcttgtatttacgttgcttcccagggccagattctcagaagcccggggctgatcttaaattaaatcccttcaccacacgcactctctgtggcaatgacaaacctgtacccttccaccttaggactcccctgtcctccccatccccccagctatagacaactgaattaatccggaggttcagtttcggtcaggctggggccgcgacccattttctccctttacctctgcccttgggtctttgcagtcccttctgatggccctagattgcaccagggacctcaaggtgactgatctcagacaccccagagctagttttctggaagccaggcctcccccacgctggtaaatcattctccaggcccactggctcatatctgccactgtgctaaatgctttgtatgcatgacctcctcatggacgcctctcccgagaaactgaagtccagagatacctggtctgttgcacgtagtccaagtcgctagcttggaggggtcacacagccagagagcctggattccctaaagccccttcccctagaaacctcagccaggccccacagcgccatcgtgaggacggcgtgagactgcgtgtgcagcgcggagcacagtgctggactcagagccaacgctaatttgactactattacattatttgtaacaaccgcctttgaaagcattttctgctgtgggttgtaaaattactgtattattggtagagtttttagcacagatccacacgcagttccttatgtgaaaggcgtaggcctaggtttgttttgcattccggattttggggggtttatttattttattttagttttttgagacggagtctcgctctgttgcccaggctggagtgcagtggctagatcttggctcactgcaagctccacctcccgggctcaagcaattcttgtgcctcagcctcccgagtagctgggattacaggaacgcgccaccacgcctggctaatttttgtatttttagtagagagggggtttggccatgttggccaggctggtctcgaactcttgacctcaggtgatctgcctgtcttggcctcccaaagtactgggattacaagcgtgagctaccacgcctggccgtaagtagccatttcttcatgctgctcaattctctgacatccaggggcttgcatatgtagggacaagaatactaactaatctttgttctttgataaaacattaaacagttgttcctctaagtcttcctcgaaaccagatttccctaatcatttcaacattccttccaaaagccatcgcttaaagccttcccaaatctaatgtcagatgtttgcgattgttgtaaataccttaacaaatagacaaagcaattgtgtgttattataatgattacaaagctaatgcatacttgtgctgacacgtgtcaccagtgtgctgatacccatggacttgagcttgtttctttattgttattattacaaaaagtggaattgtttatttttcatttattgatttatttttgagtcagcgtctggctctgttacccaggctggagtgcagtggcatgatcacagctcactgcagccttgatctcctgggctcaagtgatcctcccacctcagcccctcaagtagctgggactacaggggcacgccaccatgcccggctaatctttgtattttttgtagagatgaggtttcgccatgctgcccaggctggtctcgaactcattagctcaacaatccgcctgccttggcctcccaaaatgctgggattacaggcataagccactgcatctggccttgtttctttattattggtattctagtttttagactcctttcctgcagggagtgtgatttgactcacccaatataaggagccctggtaaccgcctcagacctgctgaggtttcggctttaggtcagagccagtttcaggaaggctgatgattcaggaccggtggagaggcctggggaacctctagcagggcagcccactgaatgcggttgtcactcagagcctgtccatgtgcttggatctgaacaggaagagaggttttatttatggtcttggtcgtgctttccctcggagtcacatttgttcctggtgtctcctcacatggtgcaggctgatgtgcctactttgcagctctttctgctgagcaaggcctgtttctacccaattaaatctaaagccttctatcacaataaaacctcaactgtcattcccatcaaccaagaagaactgaactaggaggccctgacatttgccaatctgatgtgttatcaaatgtttacattggccgggcacggtggctcatgtctgtaatcctagtgctttgggaggcagcaggatcacttgagaccaggagttcaagaccagcctgtgcaacatagtgagacccccatctctacaaaaaatttaaaaattacctggctatgatggtgtgtgactgtggttctagctacttggggggctgaggcaggaggaccgcctgagcctgggaggttaaggctgcagtgagctgtaatggtgccactgtactccagcctgagtgacagagcaagactctatctcaagacaaataaacaggccgggcgcggtggctcacgcctgtaatcccaacactttgggaggccaaggcaggcggatcacctgaggtcaggagtttgagaccagcctggccaacatggcaaaaccccgtctctactaaaaatacaaaaattagctgggtgtggtggcatgtgtctgcagtcccagctactaggagggctgaggcaggaggattgcttgaacccaggaggcggaggttgcactgagctgagattgtgccactgcactctagcctgggcaacacagcaagactctgtctcaaaacaaacaaacaaacaaacgaagtttacatctttgcctatctaagaagtcaaaagaaaacaaaaaaaggtattgccctggtatcttccttcgcatttctcctaagatgaggacattggtcatcttttcatgtgtttaagagctatttgcatttctttctacatagtttgtcattaatcacctttgcccatttttctgcaattactggtcaggtgttgtgttttaaaaatggtgcaatgggccagtgcagtggctcactcctgtaatcccagcactttaggaggccaagtcgggcggatcagaaggtcaggagtttgagactagcctggccaatatagtgaaatcctgtctctactaaaaatacaaaaattagccaggtgtggtggagggcacctgtggttccagctacttgggaggctgaggcaggagaatcacttgaacccaggaggcggaggttgcagtgagctgagatcgtgccactgcactccagcctgggtgacagaacaaaagtttgtctcaaaaataaataaatataaaaaaatacaaatataaatacaaaaattagcctggagtggtggcagatgcctgtaatcccagctacttgggatgttgaggtgtgaagatcacttgaacccaggaggtagaggctgcagtcagctgagattgctccactgcactccagcctaggcgacaaagtgagactccgactcaaaaaaaaaatggtgcaattattgcaaacagtgaaaaatggacggatgtcacatacaaatctaactttccagcctctggagagatggcctacgctatagggcacgtgttctcacagtcccttaccttgtgcagtgcattgcctgggcccatcatccataacgttaatatcctggcttgtggttatctgtggtggtgatagtggcaggaggcagtcaaatcccttggcagataggggtggttccccagtgaaacctcatcttcaagccaaagacagttttaagcctgaaggccaagctgcaagtctcagataaatccacggaccagattgagaacttgtcttcctgtttggtgcactttcctctgattcctccccacccttcatctattttacatgtacctacccttccctaatttttttttcttttctttctttttttgagatggagtctcgctctgttgcccaggctggagtccagtggcatgatcttggttcactgcaacctccgcctcctgggttcaagcaattctcctgcctcagcctcccaagtagctgggattacaggtgcccgctaccacgcctggctcatttttgaatttttaatagagacagggttttaccatgttggccagcctggtctcaaactcctgacctcaggtgatctgcctgccctggcctcccaaagtgctgggattacaggtgtgagccaccacacccagcccgtaattggttttttacactgtcatgcccatctttgaatggtgcctttgttttagcctcttttgcatactcacaaaccaatcagcatgcactcccccattctaagtccataaaagccccagacccagccacactgagggagagaccacctgacttcaggtgggggactaccctcacatcccctctctgctgagagcttttatgtcacttaataataaaaatcttctccacccttctcacccttggattgtaagtgtgatctcattcttcttggacgtgggacaagaacttgggaccctgccgaatgtaggtacaaagaaggcagtagcaccatagctccccacgattggtgcctagcggccaccccatgcaacagaaagcagtggcaagaccaggccagccctggagctacaggccagagtggggcaacataacagaactactaacatgcctcctttcgtcaggctgtggagggactaacagagctgttagcatgctataacaccacctctgggacttcagggtcatgggcttccctgtttgggtgccgccgtgttctccttgtctgaacgccagagtacacagtgggagccgcttgcaacacacctggtccagccacaaaccctacatggagcctgcccctgtgtcagtgcttgcaggggccagtgggaccccacacttgctagttcacacaccccctcccacccaggggctgagtgcaaagtcacggtggctgtgggatccatgccagagtgcaatccagctgtgccctggtgggctgagtgggcagggtgcctcctgcaacaaacctgggaacagtgcaaggccagggcagtggcattgctggccagaggtctctgggcagcaatgtggctgagaaaaatcctgcatcggtggcaactcctgggatgatcctctcgaagcactcagccgggagcctggccctgcagactcctacattatgagcctttagaagacaaaagaaatgcccaaaacaaagcagtccagctttgccttagtgatggctgtcaagggacccagttaatcaattagagatacatctgcactgtgaagatgtgcatagttggagggcagaaagttaaaaattaaaagcttaccagatagagaaaaatctttttttttttttttttcaggcagagtctttctctgtcgcccaggctgtgtgcagtggtgccatctcggctcactgcaacttccgcctcccgagttcaagcaattctcctgcctcagccttctgagtagctgggattacaggcgcccaccaccatgcctggctaatttttgtattattagtagagatggagtttcaccatattggccaggctggtctcaaactcctgaccatgtgatccacctgcctcagcctcccaaagtgttgggattacaggtgtgaaccaccgtgcccggccaggaagatcttctgaacaaaaaaggaaacttgcaaggaatcctcttggaaaatgtagggcacaaaaaatatccatttagatataaatagagacatagagacacaacccctggtagggatagagacaggtacacacacacacagaactgaaggcacacacacacacacacacacacacacacacacacttttttttgttttgttttgagacaaggtcttgctctgttgcccaggctagagtgcagtggcatgatcatggctcatgacagcctcgacctcctgggttcaagtgatcctcccacctcaacctcccaagtagctgggactacaggtgtgcaccaccacacctggcttttttttttttttttggggtaaagatagggtatcaccatgttcccagggctggtctcctgggctcaagcaatccttccgcctcagcttcccaaagtgctgggattacaggcgtgagccacaatacctagacaggcacagactcatagagtaagctccaaaaaaattctcaagccacatgccacctggagagactactgtctgcaagggtgtcacaggaggccgtgtgggggtctgggttgcctcccacctagatactccaggataatcttcttgtctcaaaacctataacttcggccaggtgtggtggctcacacctgtaatttcagcagtttgggaagctggggcaggaggataactttagcttaggaattcgagaccagcctgggcaacgtagggagacctcgtctctaaaaaacaaagatccccccacccaccttaacgtcattatatctgcaaagttatttttgccatataaggaaacattcacaaattccagaggttaggacctggataattttggcagaaggggggattattcagtctaccatacaccatagttatttatttaaattttttttgagacacagtctcactctgttacccagggtggagtgcagtggtgcgatcttggctcattgcaatctccacctcctgggttccagcaattctcctgcctcagcctcccaagtagctgggattataggtgcactctgccacgcctggctaatttttgtatttttagtagagatggggttttactatgttggccaggctggtctcaaactcctgacctcatgtgatccacctgccttggcctcccaaaatgctgggattataggcgtgagctaccatgcctgggctcttttttttttttttttttttttttttttttgagatggagtcttgatctgttgctcaggctggagtgcaatggcatgatcttggctcactgcaacctccatctcccaggttcaagcaattttcttgcctcagcctccctagtagctgggactacagccatgtaccaccacacccagctaatttttttgtatttttagtagagatggggtttcactggtgttggccaggctggtctcctgacctcaagtaatcctcggcctcccaaagtgctgggaatacaggcatcagcaaccacgcctgtcgtcttgctatgttgcccaggctggtcttgaactcctgacctcaagtgatcctcccacctcggcctcccaaggtgctgtgattacaggcatgaaccaccatgtctggctcggaccatagttcttttataataatagtggtcatcattctagtagttgttatctaatcacattttataatcattagttctaaaatattaagtgccaaaataaataaataaaaaagaaaaaaaataaaaataaaataaaatcttaagtgccaggttctgggctaagagatctaggtacagtatcacatctaattcttccagcaactctctggaatagggacctttgctaccctgaagaaacaagtagagacaatagcgctaagaaacagagaagcctaggccgggtgcagtggctcacgcctgtaatcccaacactttgggaggcctaggtgggtagatcacctgaggtcaggagtttgagaccagcctggccaacatgatgaaactccatttctattaaaaatacaaaaaattagccaggcgtggtagcgggtgcctgtaatcccagctacctgggggactgagataggagaatcgaggtaacggttgcagtgagcagagagagtgccactgcactccagcatgggtgacagagcaagactccatctcagaaaaaaaaataaataaagaaatataaaaatacaaaaagttatccaggcatggtggtacatgtctgtaatcccagctacttgggaggctgaggcaggggaatcacttgaacctgggaggtggaggttgcggtgaaccaagatcgcaccattgcactctggcctgggtgacagagcaagactctgtctcaaaaaaagaaattatatatatatatatatatttgtggaatgaatgagtaaattaatatgtgaaagaagctgtggtgttaaaaaatattttaaacaaaaacgatggccggacacggtggctgacgcgttgaatcccagcactttgggaggctgaggtgggtggatcactcaaaatacaaaaatttacccgtctctactaaaaatgcaaaaattagcctggcgtggtggcacatgcctgtaaccccaggtactcgggaggctgaggcaggagaatcgcttcaaccgggcaggcagaggttgcagtgagccgagatcgtgccgctgcactccagcctggatgacagagtgagactccatctcaaaacaaaaaaaaaacctcggtgaagtctggtctgaccccggagcccttaatcaccaccccaggataccccattcacaagcacaagaaacacagttacactcagatgcccccttctctgggcagaggtttcctaagactttgtatatattaagttttgttaattgcacctcactgaaaggtgttggccctctgtgctctccgcctgccatgattctgggattttggtcctccctggcatcgaccctgctgaatccagacagtagagactggggagttgcttgttggtgtcaggggatctctgaaaaccatgggctcaggtcgtgactttgcaaataatacttcccgggggaacactgggcatagcattttttttctttttttgagacagagtcttgctctgtggcccagactagagctcagtggcataatcatagctcactgcagcctcaacctctttggctcaagtgattctctcctctcagcctcccgagcagctgagactacaggcatgtaccacggagcctggataatgttttgtttattttttgtagagacgagttctcactaggttgcccaggctggtcttaaactcctggcctcaactgatccttctgtcttggcctcccaaagtgttgggattccaggtgtgagcctgggcatagattttttataagtcagtgtttgccagatgtcaaatatttgtgctgtggcctgaatgtttgtgtctacccaaatttctgtgttgaaagctaatccacagtgtgatggtattaaaaggtgggatcttcaggaggtaattagcacttgagggtgggcccctcattaatgggattagtgcccttgtaagggattgaagagaccagagttctcgccttctgccacttgaggacagagtccaaaggcaccatgggctgggcactgaggctcatgcctgtaatcccagcactttgggaagctgaagagggagcattgtttgagcccaggagttcaagaccagcctgggtaacagtgtgaaaccccatctctacaaaaaatataaaaactagccaggtgtgatggtgggtgccagtagtcccagctactcaggaggctgaagtgggaggatcgcttgagcccgggaagttaaggctgcagtgagctgagatcgtgccactgcaccccagcctgggggacagagcaagaccctgtgtcaaaaaaacaaaaacaaaaacaaaccaaaaaaacccaccatctatgaaccagagaatgtgccctcaccagacaccaaatctactggtgctttggtcttggacttcccagcatccagaacggtgagaaatacatttctgttgtttattgaaatacccagcttatggtattttgctacagcagtccaaagggactaagacagtttgtaagtggatctcctttgaagatccaggctcaaaaagaaaggcagccagtggctttggtctagctggccagctgggtcaccagggacctgtgcattcccagaggggctagcccatgggaagaggatttgaaaagaaatgtgagaatcttgcttcacagacaatatttccctgggggagagaaagagaagagcatgtttacatgaccagtttcatgtgtattagtggtgggttgccctaccactagaaatacacattcctaggagagaatgtaaatttccttccttccttccttcctccttccttccttctttccttccttccatccttctttcctcccttcctccctcccttcctccctcccttcttttctttctttccttctttctctctttccttctttctctctcctactttcttatttctttctttttgagatagggtcttgctctgttgcccaggctggagtgtaatggtgcaattatgattatgatctttcttttcttttccctctctttcttccttccttcctttccttccttcctttccttctttccttcccttccttcccttcctttttttttgagacggagtctcgctctgttgcccaggctggagtgcagtggtgtggtcttggctcactgcaacctctgcctcccgggttcaagcaattctcctgcctcagcctcccgagtagctgggattacaggtgctcatcaccacgcccggctaaattttttttttttgagatggagtctcactctgttgcccaggctggagtacagtggcatgatcttggctcactgcaagctctgccttccaggttcccgccattctcctgcctcagcctcccgagtagctgggactacaggcacccaccaccacgcctggctaatttttgtatttttagtagagacggggtttcactgtgttagccaggatggtctcgatctcctgaccttgtgatccacccgcctcagcctcccaaagtgctgggattacaggcgtgagccaccgcgcccggccaattttttgtgttttttgtagagacagggtttcaccgtgttggtcaggctggtcttgaactcctgacctcatgatcagcccatcttggcctcccaaagtgctgagattacaggcatgagccactgtgcctggcccaaatttttttatacattgcaaatacttaaaacaccaaatagcccagatgattctttttttttttttttttttttgagatggagtcttgctctgtcgcccaggctggagtacagtagtgcaatcttggctcactgcaacctccatcgcctgggttcaaacgattcttctgcctcagccccccaagtagttgggattacaggtgcacaccaccactcctggctagtttttatatttatagtagagatggggtttctccatgctggccaggctggtcttgaactcctgacctcaggcaatccactcgcctcagcctcccaaagtgctaggattacaggcttgagccaacgtgcctggcctgatgattcttaaatataatataaaagtcttaattctggggctttgatttccttcatctctgtattcaattttaaggcttcgtggctgaacatgaaaagacacataagaaaacaattttattggccaggcacagtggctcacgcctgtaatcctagtactttgggaggccaaagtgggagaatcactggaagccagaagtttgaaatcagcctgggcaacaaagcaagaccctatctctgttcttatttgttattattttatttatttatttattttttgagatggagtcttgctgtgttgcccaggctggagtgtgcagtgcagtggcgtgatctcaactcactgcaacctctgcctcccgggttcaagtgattctcctgcctcagcctctggagtagctgggattacaggcacctgccatgacgcccagctaatttttttgtgtatttttagtagagatggggtttcaccatgtgggccaggctggtcttgaactcctgacctcaaatgatccatctgccttggcctcccaaagtgctggaatcacaggcgtgagccaccacgcccggcctcttatttattattgttttttgtggtggggacagggtctcactctgcagcccaggctgaagtgcagtggtgcaatcatggctcagtgcagcctcagcctcctgggctcaagtgatcttcctgctttcgccttccgaacagctgggactacaggtgcgtgccaccacatccagtcaatttttctattttttgtagagacagggttttgccatgttgcccaggctggtctagaactcctgacctcaagtggtccacccaccttggcctcccaaagtgctgggattacaggtgtgagccacctcctgtctcacctcacaggagtgctggcctcctgtctctattcctaaaaaaaaaaaaaaaaaaaaaaaaaaaaagaaagaaagagaaaagataacaattttgctagctaggtgagattaattcttggccagataatttattattgggaagggagttctgactttctagttacggaaaaaaaaccttagcctggcatggtggctcacacctgtaagcccagcactttgggaggctgaggcaggaggatcactggagcccaggagtttgagaccagcctggacaacctagggagacccccgtctctacaaaaaatttaaaaaattagatgggcatggtggcatgcacccatggtcccagctacgtgggaggctgaggtgggagaatcgcttgagcccaggaggtcaaggctgcagtgaggtgtgtttgcaccatagcactataacctgggcaacagagcgagaccctgtctcaaaacaaaacaaaacaaaacaaccttttcaaaaatgctgctgagcccttctaaaattgttaccataacaaatgggcttcatgggctacaaaggtttggtcctctggccttcagtctgggttcatggtgtaccatcagctcactttcctaaccagtgacattagagggaagtctgtagctacccaggtggctcgcggctggactggcatcagccggtctctctgtcgcccagctctattctgcattctttctgcattccatctcaccgtctggcctggccacggcccctgagagtagttacatgatgcctggcaggccgatgatattgcctgtcaccccttcggccagctttcctcctggccaggctgatgttggggttgtgacccagagatgaacaggcaggtctcagggggccccttggggaggctgtagattgttcctgggagggatcagctctcataatgtcaacagagtgcaagggggatgcaactcatctgtcatctaccagcccaggggcggcaccgtgtgtggctgccaggctcagcttacaaacctcagagtctggagacctggaggaggggaggcgaggagcccatgttgggggagatcaaataacaggctctgggcaggctggagggggacagagggaggaggctggccaagcaatctccaagcccagccctgccaccagtcaatccacagatgagcgcctactgcatgcagccctccctccctccctctctccctccctccctctctccctccctctctctctttctccttctttctttccttctttcttgctttctttctttctttctttctttctttcctttcttttttctctctctctttctctctctttctttctttctctctctgtctctctctctctttctttctttctttctttcttcctttctttcagacagggtctcactctgttgcccaggctggagtgcagtggtgccatcatagctcactgcagcctccaacgcctacactcaagcattcctactgcctcagcctcctaagtaactgggattacaggtgcacaccaccacactcagctaatttttttatttttatttttttaatagagacagagtttcactatgttgcccaggctggtcttgaactcccgggctcaagtgatcctcctgcctcagcctcccagagtgctgggattacaggtgtttgccaccacgcccagcctaacacctgttatgtgcagtgcgctctcttagggttctgctgtctcgaaggtggaggagtgataacccagctgcgggatgatcctgtctgagggatgatggcagaagtcaggcgtgttctgaatgtcctttgaaggaaagataaaaggatttgctgctggactggatttggtgtgagaaatggggagagacaggagtccaggacaaggccaggctcttgggtctggcagctggtgaaataagagtgccgctccctgaagatggcgtgcggaatctgaataggttcagaaggttgcaaaatctttctgggtatgtgctatgaacttcaaggccaatgtttctctacattttgtaaccatagtctgagtaagaaatgcattctggccgggtgcggtggctcacacctgtactcccagcactttgggaggccgaggtgggtggatcacctgaggttaggagttcaagaccagcctggccaacatggtgagaccctgtctctacaaaaatacaaaaattagacaggtgtggtggcgggcgactgtaatcctagctactcgggagggtgaggcaggacaattgtttgaacctgggaggcagagattgcagtgagctgagattgtgccattgcactccagcctgggtgagagagtaagattccatctaaaaaaaaaaaaaaaagaaatgtattttacacaacaatcaatacacctgaaagtagaatttctgcagcaatgtttacccgttgctgtgtgcagtgcactctgatgttttctattgaatttcattttttaaaaattgtgctggttgtgacttttatccgttggtcatgatctaaaaattgaaaattatcattctaggttctacctcttcaagacttagcttgagttctttactgccctggagaagtctgggagtgtggccgggtgaccacggggcagccagagcctggcagggatgactggaaggaggggagctaagactttgcagtgttcctccagggatgatgatgtaatcatggaagggctcaaagcctttcccaaggacagggtcaaggctactaagtccaagtagcagggacaggcacagcccggccagtaagggtgtgtggcccggggctggtgcctcccttactccctggtcctgcagaggacgcctgggatctgcagcactgtggcaatgacatgttggggagaagggaccctcgcaggctcccagacctgctttgtgacttactgagtgagtgcccgacccctgcctcaccagccctgggcttcagagcctgagaatgaaacccgcccttcttccacctcctctcctgcccatctccttccctccttcctcttcccagctggtgccacgaggagctggcggacctccaagagaattggccaagaatgcagcctctggacagtgacctgggtgagaatcatcacagtggctcaccccggacccaggaatttcacttagtccttgtcatcatccaccaatgcgggacagctcggcccagattgttcatggctcaagacccccaccccaccccattctgcttggttgggctgtgttgtttattttatttaatgaattaatttatttatttgaaacagaatcttgctctgttgcccaggctggagtgcaatggcacgatctcagttcactgcaacctctgtctcccgggttcaactgattctccttgccatggtcccctaagtagctaggattacaggtgcctgccaccacacccggctacttttcatgtttttagtagagacagggtttcattgtgttggctgggcaggtcttgaactcctgacctcagctgatctgcctgtctcagcctcccaaagtgctgggattacaggcatgagccaccatgcccggccgcactgtgctgtttttaagcctcttgaatatcatcacctctctttgtttacagatggggaaacagtttacagacggggaaacaggctcagagggaaaaaataccttttcagggttttccaggcaaagagtggcagagcagagaccaacctccgcctggccaaagcccttctctgcttcctgtccatttgtgggtgatctggtggtttctccttttctttctttctctctctctctctttcctttctgacagagtcttgctttgtcgcccaggctggagtgcaatggtgtcatctcggctcactgcaacctctacctcacgggttcaagcgattctcccacctcagcctcccaggtagctgggactacaggcgtgtaccaccacaccttgcttttttttttttttttttttttgtatttttagtagagacggggtttcaccatgttggccaggctggtttcgcactcctgacctcaagtgatctgcccaccttggcctcccaaagtgctgggattataggcatgagccactgctcccggccagatctggtggggtttttttgagacacagccagatcttcacagtgccaggtggggtgatgtgcaggactgcagctgtgtctggattctggacaaggctccaaatgatcaccaccatatcttggctgttcagttaggtgggtctgggctagagatgagaaaggaggggtgagggaggaggagaggaatctgagcctcagatctgaggctgcaggcctctctgcatcatctcctcttccacatggtacccacttttgggaaaggcatccggatgtgtgcattgaacagtatacaagggcctgtggtcctgggacaatattttaacacaggctttattattatttgggtatagtaaaaccaagagatcctgagatgacagttattaggaaggttgttgtacttacaaattccaagaggaggggacatgccatactatggagaccacacagggactcaccagggtaggtcaggaggcagagggaacacagggagctctgggcaagaggctttattgtgggcaagatggggacacacagtaaaagcttacttctcattcctgttattgcccaggctgcctgggcagatgctctactccacgcagtcatttagggatccaggctatttccatctagtggccccaccatcctcccaggcctcataatattccactggatcagtccagcaggtgagagggatgagggcatggagagttatgggggagatatttgtgggtcagccccagaaacgtaacacgtcactcctgcccacattctctactgaactgcagaggaggcttggaagtgtagtcaggctctgtgtgcccagaaggaaaacaagacagggcttgatgaacacagatcccagtctctgcattgagagcatttcccagaagccaccgtaagggcttctccttttgagtcacggatcagagctgagtcacatgcacactggcaagaggaaccaggatcaccctgatatctaaaccatcaggatttccttccagacttgggaatgggaggagatgccaacaaactcaaggctgtattagacaggaagtggggatggctaatggataggtgacagacagtttcagccccttcttctcacagctccctgccatttctcctcaccactccacaatccccatccttttttttttttgagacggatttttgctcttgtcacccagactggagtgcaatggcgtgatctcagctcactgcaacctctgtctcccgggttcaagcgattctcttgcctcagcctcctgagtagctgggactataggcacatgccatcacgcctggctaatttttgtatttttagtagagacatggcagcaggcaagagagaaatgagaaccaagtgaaaggggtcccccgttataaaatcatcagatcttggccaggcgcgatggctcatgcctgtattcccagcactttgggagactgaagcaggcagatcacctgaggttgggagttcgagaccagcctggccaacatggagaaaccccgtctctactaaaaatacaaaaattagctaagtgtggtggtgcacgcctgtagtcccagctacttgggaggctgaggcaggagaatcacttgaatctgggaggcagaggttgcagtgagctgagatcacaccattgtactccagcctgggcaacaaagccagctcaagaaaaaaaaaatcagatcttgtgagacttatttactaccatgagaacagtatgggtgaatccgcctccatgattcaattatcccccccaagtccttcctataacacgtgagaattataggagctacaattcaagatgagatttgggtggggacacagcctaataatatcaccccctccctcactaacctccattagttcttcttccctgagggttgaacagaaaccagccttttgtgttttgttttttatttgttagtttgtttttgagacagtctcgctctgttgccaggctggagggcagtggcatgatatcagctcactgcaacctccgcctcctgggttcaagcgattctcctgcctcagcctcccgagtagctgggactacaggtgcgtacgaccatgcccagctaatttttgtatttttagtagagacggggtttcaccatgttggtcaggatggtctcgatctcttgacctcaaatgatccgttcacctctgcctcccaaagtgctgggattataggcatgagccaccatgcccagccaaaccagcctttttgaaaggctcattccactgttgatatcaaccaattgcccgatgctacctgttttgtgattttgacacaactgaccagcattccttcgtgataagatactatcagtcacagagtggttctggccagtctacagagtttgcacactgagggccctcatgacctcggcttcgccttttgtttttgtttgtttgttttttgagagagtcttactctgtctcccaggctggggtgcagtgcagtggtgggatctcggctcactgcaatctccgccttccaggttcaagcgattctccttcttcagcctccccagtagctgggattacagacacctgccaccatgcctggctaatttttgtatttttagtaaagacggggtttcgtcatattggccaggctggtcttgaactcctgacctcaagtgatctgcctgacttagcctcccaaagtgctggaattacaggtgtgagccactgcacccaaccctctgcttcaccttttgatgtatagggcctaattgtaatgtgtttaaatgttaaattgtaatacatttaaatattcaccccagatgaacatgggatgcatgtgcatatgttggcctactatgcatgcacacgtttcccctttgtgaatattcatagctcctcctgtaacctgttgaatatatatatttggccaccccattcagcataaacccctgtcttcatcttcccaccttcaaagtgcctgtttttggcttctggccagaggctacacttctgagcttgtcagaatagaccacctgcaggctgcaaccccttatgagaaataaagctctcctttccaagtgtatgaacctcatcattcttcagctgacacagctaaatttcagggaacactacaactaaagggaagaagggaagaaaggctgtggggatgctgcttagtttctaccatgacatgatggcaggcacagtgctaagcttgctcatgtatctttttttttgagacagagtctcactctgtcacccaggctggattgcagtggcacaatctcagctcactgcaacctccacctctcaggttcaagcaattctcatgcctcagcctcttgagtagctgggactacaggcacccgtcaccacacctggctaattttttgtattttaagtagaggcagggttttgccatgttgcccaggctggtctcgaactcctgagctcaggcaatctgcccgccttggcctcccaaagtgctaggattacaggcatgaaccactgcacctggctgctcatgtatcgtttaattgaacctcccgcaatcctatgaggatgctggatcagggaaaaggactttggttacaagcagcaggaagtccagttaacattggggcctgctaatacaagggtacttattgtttatttaacaagcactcttgagataagctatcttgggatcttggggttggtctagcagctcagttatgtcttcagggagccagcctgcttctcttcctttccatcaccctcagcatgttggtgtttgtcttagaggttggcagcctcagcggctgggaccataacttcacacacaaaggcaggaagacataggaagggaagggcgcccagcacacttcccctgatgccttcttgagcagaactgggtcaaagggctacctttagctgcaaaggaggctgtgaaagcaaacatccagcaaaggggaacaagctagccacatctggtgtattcttttttttttttttttttttgagatggagtctcgctctattgcccaggttggagtgcaatggcacgatctcatctcactgcaaactccgcctcctgggttcaagcaattcttttgcctcagcctctcaagtagctgggattacagatacccaccaccatgcccagctaattttttgtatttttagtagagacaggattttgccatgttggccaggctggtcttgaactcctgacttcaggtgatctacccgcctcggcctcccaaagtgctgggattacaggcgtgagccactgtgcccagctacgtctggtgtattctaattcatcatccacggctgggcacatggctgcaccaaaaaaaaaaaaaaaagaaaaaaatagctaggttctgttagccaggaagtgggggatggcctgcaagtaacagaatctgccacagtaggaacaaggtgacatctacaatgtttaataatggcatggtatggcggtggccatcattgctgacataggctggggcacctgattagggtctcagacactcccttgtgtgcccctttgattatggagagacaaggaaactccaaagaaggagcaaaagaaaggagggcacttggcagtgaacactcaacaagcagtgtagaagattttaacatttactgcaatcccagcactttgggaggctgaggcgggaggatcacttgaggtcaggagttcgagaccagcctggtcaacatggggaaacctcatctttactaaaaaaaaaatacaaaaattagctgggcatggtggcacgcacctataatccttactacttggaaggctgaggtgggagaattggttgaatccgggaggtggaggttgtagtgagctgagatcgtgctgctgcactccagcctgggcaacagagcgagactccgtctcaaaacaaaacaaaacaaaattaacatttaaatgacctgttcggctgatagagagttcccactccagacccccatgaaggcaatcaagagccctctggttgctctgtggccccctaggaatgttcataaaggcagaacatcactgtctcagtctgtttgtgctgctgtgacaacatatctatgactgggtaatttacaaaaaacagaaatttattttctcactgttctggaggctgggaagtgcaaaatcaaggtgccagaagattcagtttctggtgaagatcactctcagcttccaagataacagctcattttttttttttttttttttttttgagataggatcttgctctgtcacccaggctggagtgcagtggtgcaatcatggttcactgcagccttgaactcctgggctcaagagatcctcccctggccaggcacggtggctcacacctgtgattctagaactttgggaggccaaggcaggcagattgcctgagctcaggagttcgagatcaggctgggcaacatggtgaaacctcgtctctactaaaaatacaaaaattagccaggtatggtggtgcatgcctgtaatcccagcttactctggaggctggggcaggagaattgcttgaacccaggagacagaggttgcagggagctgatattgcaccactgtactccagcctgggtgacagagcgagactctgtctccaaaaaaaaaggtcctcccatctcagccacctgagtagctaggactacaggtgcatgccactgggcccgactagttttttaatattttgtagagacgggggtctcactatgttgtccaggatggtctcaaactcctggactctagtgatcctcccgcctcagcctcccaaagtgctgggactacaggtgtgaaccaccatgcccagccaataaaaaccacaagaatctaatagtcatcccctgggccagaccttgttctaagcacattgcacatattaatatgcagcttgtgcaggtatatacggttatattatatgggtaggtagaatatataatatatatagaataataagtagatactttattggcactattatgtagaggagaaaggtcttagaaattaagcagtttgtagccacgcgcagtggctcacgcctgtaatcccaacactttgggaggccgaggagggcggatcactagaggtcaggagatcgagaccagcctggccaacatagtgaaacgctatctctactaaaaatacaaaaattagccaggcgtggtggctggcgccgtaatcccagctactcgggaggctgaggcaggagaatcacttgaacccaggagacagagtttgcagtgagccgagattgcaccactgctctctagcctgggcgacagggcaagactccgactcaaaacaaaacaaaaaaaataagtggtttgcctaaagcagtggttttcagttgggaatgatttttccccctggggatatttggcagtatctggacacattttttggctctcacaactgagaagcaggggtgctattggcatctagtgagatgaggccagaaatgctgctagacattttccaattcccagggtgggcccttccagccagaattatccagccccaaatgtcaccagtaccaagaatgagaaactctgccctacagacattgctgcccatggcccctggaggaaggtagataatgttcacagcaacatgggtgagaaatagtccccaaactgggggcactagcacactaaggacacaatgacacatagattgtagtccactcccatattggacaaaattgatgaacagtagttatcttcatcaaaatggatgaatctcatattaatgttgaatgaaagatgcaggtcacagaagaatccaggtggtatgctttcatttgtatcatttatatcatttatatcaaacacaggccaggcacggtggctcatgcctgtcatcccagcacttggggcggccaaggtgtgtggatcacttgaggtcaggggtttgagaccaggcgtggtgaaaccccatctctactaaaaatacaaaaattagcaggacgtggtggcggacacctgtagttccagctactcggaaggctgaggcaggagaatcgcttaaatccagcagacagaggttacagtgagccaagatcacgccactgcactccagcttgggcaacagagtgagattccatctcaaaaagaaacaacaacaacaacaaaaaaactacacacacgcacacacactcacacacacgatagatggccaaacactaaaaaaaaagcctgcaagagattattacaaaaaattaggatattgccaagcatagtggctttcacctgtaatcttagtgacttgggaggctgaggtgggaggccagaagtttgagaccagcctgggaaacatagtgagaccccatttctgcagacaaaaaataaaaagttagttaggcatggtggtccacacttgtagtcccagctacttgggatgttgaggtgagaggatcgcttgagcccaggagtttgaggctgcggtgagccatgattgcatcactgcactccagcctggaaaacagagtgaggcctcccactctaaaaaaacaaatcaggccaggcgtggtggttcaagcctataattccagcactttgggaggtcgaggtggccagatcacttgaggtcaggagttcgagaccagcctggccaacatgatgagactccatctctactaaaaatacaaagaattagccgggcatggtggcacatgcctgtaatctcagctactcgagaggctgaggcaggagaatcatttgaacccaggaggtggaggttgccgtgggccaaccttgagtggaggttacaccactgcactccatcctgggtgacagggtgagactccatctcaaaaaaaaaaaaaaaaaatatatatatatataattatatattttatatattattatatatattatatattatatatttaaaaatatatattatatatttaaaatatatattatacatattatatatttatatatattatatattatatatatataaataaataaaaattaaaaaacaaatgagaggctgggcatggtggctcacgcctgtaatcccagcactttgagaggccaaggcaggaggagcacttgaccccagcagtttgagaccagcctgggcaacacagtaagaccccgtctctataacagcaaaaacaacaacaaaaattagccaggtgtgctggctcacacttgtagtcccagctacttgcgaggctgaggtgggaggatcccttgagcccaggagacggagcctgcagtgagctgagatcacagcactgcactccagcctgggtgacagagcaagaccctgtctcaaaaaaaagatcagattattgatgatctctgagtatgatggaagggaaaggaaagcaggcttctaaagcactggtaatattccatttcagaacttagttggtggacagaaaagtattttattgttgtttaaaaataaatacacaagcacacacacttttttacttatgtagggtttcctgggaaacagattctgaggtggagatttgcaggcagatggttttggaggagtgctctgtggggggaaacttctaagggagagaggagcgcaaggtgggcagagggagacgtggaagtgtgatgtgcttgccaccagagcctcagccaggatggcagagaatgcggagctggggtggcctgtccgagggatccccggctgaggcatggagccaggcctttgtacttccttatgaaccagatatagaatgtgggctgcccctggggattggggataaccttgggccagatggctttcttcagctgaagtcccagagagaggtgcagctgtaagccatcagctaccaacaccccaggctgctggcagaaagaatgcctcagtcctaaagagggggtgtgggtggcatattacagcatccagcacgcctttgtacctacgatgtatttgacaacaaaaatttagaaagaggccgggtgcagtggctcacgtctgtaatcccagcactttgggaagctgaggcaggtggatcacttaaggtcaggagttcaaaaccagcctggccaacatggtgaaaccccgtctctactaaaatacaaaaattagccaggtgtggtggtgggcgcctgtagtcccagctacttgggaggctgatacaggagtatcacttgaacccaggaggcggaggttgcaatgagccaagatcttgcccctggactccagcctgggtgacagagagagactccatctcaaaaaagaaaaaataaatttagaaagaaaatatattcatgtaatacatcatattaacagatgaaaagatacaaataatttgatagaatttgacactctaggctatgcacagtggcttacacctgtaatcccagcccttttcgaggccgaggtgggaggatcgcttgaagccaggagtttgagaccaggctgggaaacaaagaaagaccttgtttctacaaaaattaaaaaattagccacacactcctgtagtcccagttaatcaggaggctgaggcaggaggattgcttgagtccaggagtttgcggctacagtgagccatgataatagtcttcaatctgataaaaggaacctaccaaaatcctataacaggtatccaacttaattagaaaaattacctttaaagaactgtcttagtccattttatgttgctgtgactgaatacctgagactgggtaatttataaagaaaaggggtttatttcttacagttctggaggctggggagtccaagtttgagggttttttttctggtcagcctctggtgagggtcttgtactgtgtcataatatggcaaaaggcatcatggccaagaggggtgcactgaagtccaaactggctttttataccaaacccactgtggcgataactcacccactcccatgataactcattcaaccattaatttttttttttttgagaaggaatcttgctctgtcacccaggcaggagtgcagtggtgcgatctcagctcactacaacatccgcctcccgggttcaagcgattcttttgtatcagcctcctgagtagctgggattacaggtgcgtgccaccacatccggctaatttttgtatatttagtagagacagggtttctccatgttggccaggctggattcgaactcctgacctcaggtgatccccctgcctcaggctcccaaagtgctgggattacaggcgtgagccactgtgcctggccaatttttgtatttttagtagagatggggtttaaccatgttggccagactggtctcgaactcctggcctcaagtgatccacccgcctcagcctcccaaagtgttaggattacaggcgtaagctaccgtgcccagcctcacccccagtctttcatctgatgcctgacgatgtccaggcaacgtggtaataatcatccagttccattttccttgtatttagttttcctgccgtacatctcaaaaggctgaatcaactcatttgcccatgcatctcctccaccagcacattctcccaagcctccatgggtgacagtttcaacaactggactgtcacctgtgccagggactgtgcttcccctaccccctgggatggtgtcctcattgtcagccaggcaccgagagatttggttcccaagcctcatgttaccatctgctttctcagaccactcctggtagaagctatgcggttctgcttcactaggaagcaatcctgagatggattttgaagtgcaggccagagacgctgcctcacacttataatcccagcactttgggaggatcacttgaggctaggagtttgagaccagcctgggcaacatagtgagaccctgtctctacaaaaaataaaaaattacctgggcatagtggtgcacatgtagtcctacttactcaggaggctgaggcaggaggatcacttgagcccggggggttgaggctgcagcaagctatgattgtgccactgcactcctgggcctgggcaacagagcaagacctcacttccaaaaaaaaaaaaaagtgcaaaagcattttcaaggagttacacttgtgaaatgaaaagtattgaccgggtgctgtggctcaagcctttaatcccagcactttgggagaccgaggtgggcggatcacctgaggtcaggggttcgaggccagcctgactgacacgctgaaatcccatctctactaaaaatacaaaaaattagccgggcgtggtggcgcatgtctgtaacatatatatatatgtaaaggattagataaataaatatcttctgcagtaggactgttgaaagaaaaattaaaaagaaaaaataaaaataaatatagatagaatgtgtgtttatctccatctatccatgtattcatctatcaacattatacacacacacactccctagttctgtccactgagaggtcctgggagtggtgacaccccagtagtaatgaatacaccaagcacccagatatggtgtgcttggtgtgttctacatccctccactatggaagtatgacaggaacttggcacatatcgttgtgccggaaaagtaaggaagtgcttgaggaatgatgagggcatattaaaatgacataggaatcagcctgaaggatctctcaatggccaaatctggggcaattttatttatttatttatttttttttttgagatggagtctccctctgtcacccaggctggagcacaatagcgcgatcttggctcactgcaacctccgcctcctgggttcaagcaattctcccacctcagcctcccgagtggctgggattacaggcatccgccatcatgcccagctaatttttgtatttttgtagagacagggtttcaccatctttgccaggctggtctagaactcctgacctcaggtgatctgccctcctcggcctcccaaactgctgggattagacgcatgagccaccactcccggctaattttagaaccaaaatgaataagaagagtgtgatgaacggaattgtgtctctgtccccagattcatatgttgaatcctaatctctagagtgactgtatttagagacagcgtctttagagaggtaattaagatcacatgaggtcatgagggtggagccctaccccattatgctttgggttttttttttttttttttctgagatggaatctagctccatcacccaggctggagtgcagtggtttgatcttggctcaccgcaacctccgcctcttgggctcaaacgatcctcccacctcactccctgagtagctggggctaccggcatgcgccaccatgcctggataatttttgtttttttaagtagagacagggttttgccacgttggccaggatggtcttgaactcctgacctcaggtgatctgcccaccctggcctcccaaaatgctgggattacaggcgtgagccacagcacccggccaattatgctatgtctttataagaagaaggagagaacaaggatgtgtgcccacaaaggaaaggccatgagagagaggacacagccagaaggtggccatctgcaagccaaggagaggcattaagagaaaccaagcctgccaggctgggcaccgtggctcatggctgacgtagcaggatcacttgaacccaggaattctagaccagcccgggcaacaaagagagatcccatctctacaaaaaaattttaaaaattagccgggcgtggtggtgcacgccttgtagtcccggctactctgggaggctgaggcaggaggatggcttgagcccagggagcccgggaggttgaggccgcagtgagctattgtcgcaccagtgcactccagcgtgggtgatagagcatgacactcaaaagaaacaaaaaccaaaaaagacatcaacctgccaacacctttttttttttttttttttgacagagtctcgtgtcctccaggctgaggctggaatacagtggcgtgatcttggctcactgcaacttctgccttccaggttcaagtgattcccatgcctcagcctcccaagtagctgggattacagcatgagccaccatgcccatctcatttttttgtatttttagtagagtcggggtttcaccatgttggccaggctagtctcaaactcctgacctcaagtgatcgcccacctccgcctctcaaagtgttgggattacaggcatgagccaccacgcccggctatgccaacaccttgatcttggacttccagcttctagaactgtgagaagtaaatttctgttgttgaagcccccaagtctgtgaattttgttacgggagcccaagccaatggatacagagagtaacattgtagcccactgaataaaataggaaaccacaagtcaatactgatatatgtagataaatgaatgaatccaaaggttgatgaagaatgggatatttacagtgttttaaagaacttatgaaacactaattacaaagaggaaagtaacttgacagtgaaggttggctgacaccactttaaatcaagtgatcaaggtgaaatgtcatcaatactgggacaaattgaaattgtgcagcacatgaaaaatgcagtggggacacacagaaaagtctctttggtgatattcttgccaaagatgttataatctgaatctaattataaagaaacatcagacaaaagcaaatggagagacactgtgcaaagtaaaactggcctggccaggagtggtggttcatgcctgtaatcttagcacttgaggctgccgaggtgggcggatcacttgaggtcaggagttcaagaccagcctggcaaacatggtgaaaaacccgtctttactgaaaatacaaaaattggccaggcaaggtggcctactcctgtaatcccagcactttgggaggccaaggtaggtggatcacctgaggttgggagttcgagaccagcccaaccaacatggagaaaccccgtctctactaaaaatacaaaaaattagcctggcgtggtggtgcatgcctgtaatcccagctattcgagaggctgaggtaggagagtcgcttgaacccgggaagcagaggttgcggtgagcctagatcacgccactgaacaccagcctgggcaacaagagcgaaactccttctcaaaaaaagaaaaagaaaaaagaaaaaaaagcacatcccgctaaccacagagatctatcttcgaaagccaagtggcttcctccttgtttctgtatgaattgttttatgtggttcaagacattgactcaggcacagcaagtacagctgaccagtaagttgaagctgatctgaacagtgttcagggctgagacagtgtcctaataatcaggggacaacacacacacgaaatataatcccaggccaggtgctgtggctcatgcctataatcccagtactttgggagggtaaggcgggaagatcacttgagcccaggagttcaagaccagcctgggcaacatagagaaaccccatctctacaaaagatgcaaaaaaggcatggtggtgtgcgcctatagtcacagctccttgggaggctgaggtgggaggatcacttgaggccaggaattcgaagctgcagtgagctgagatcataccactggactctagcctgggtgtctccaaaaaaaaaaaaaaaaaaaaatacagaaaagtacaatcccagagggcacacgtggtgccccctggagacagagagtttacagtttttagggaaccccaggcaggaggtgcattcataagaggttcaggggccccagtgtggtgttccagcctgggcctccagccctaaagttgccagaccagtccaaacggatctgctcagtccttgctgtcagagggaatgcccaaggcagtcaattccagatgggttttgcatgtccatgacaacagtgtctctgcctgaggagtgtggacagcaaccccagctgggcgttctggtggaatatccaggagctgggccaccccaggtggcaggtgagcaggtggaagtatagggatcaaatggagggtcacagtcaatttgaattcaaatcagtccagcagcttggaaaggcaagaccgggtgtttcttcttatttttctttgggaggaggggaaagttctcgggagtagttctgaaaggcagaggtcattactgcccacccccaactctgcatctccccagatgccaagtttgtgtttgggctttttttcaaacattaattaattaactagttaatttttagagacaaggtctctctctgtcacccaggctggagtgcaatggcgcgatctcagctcactgcaacctccgcctcccaggctcaagcgatcctcccacctcagcctcccaagtagttgggactacgggcacatgccaccacgcctggctaatttttgcattttttgtagagatggagtttccctatgttgcccaggttgcccaggctgggctcgaactcctgggctcaagaaatctgcctgcctcggcctcccaaagtgctgggattataggtgtgagccaccgcactctgcctgtgttttggctatttaaaaatgttttattggctaggcatggtggctcacatctgtgatcctagcaatttgggaggcttaggtgagcggttgcctgagcttaggagctcgagaccagcctggccaacatggtgaaacccccatctctactaaaaatatgaaaaattagccaggcatggtggtgcacgcctatagtcccacttacttgggaggctgaggcacaatactcacttgaacctgggaaccagaggttgcagtgagcggagatggtgccactgcactccagcctgggcaacagagtgagactctgtctcaaaaaaaaaaaaaaagaaggttttatttatttaaatataaatggggtctcactatgttgcccaggctggacttgaactcctgggctcaagcgatccttctgcctcagccttttgagtagctgggattacaagcatgtgctaatgtaaccggctctgtttttgcctttttgttacaaaatcagtatgtctcattcggtcattataactttagatttttttccatttttacggaggtaaaattcatacaatatataaatcactattttagccatttaaaaatgtatataattcagtggttttcggtacattcacaatgttgtacaaccatcaccaccatctagttcccaaatcaccccaaacaatccgtgtacctgtgagcagtcactctccatcctccctcctcctccctggcaaccgctaatctatttcctgtctccacagattttccgattctgggcaattcatataaatggattcataaaatatgtggccttctttcatttagcatgttttcaaggttcatccatattgcagcatatatcagtatttcattccttttttgtacgtttgttttgagacagagtctcgctccatcgcccaggctggagtgcagtggggtaatcctggctcaccacaacctctgcctcccaagttcaagcaattctcctgcctcagcctcctgagtagctgggattacaggcacccgccaccatgcccagctaattttttgtatttttagtagagacggggtttcaccatattagccaggctggtctcgaactcctgacatcaagtgatctgcccgccttggcctcctaaaatgttgggattacaggcgtgagcctccatgcccagcctattcctttttatgatggaataatttcccattgtatggatggaccacttttggtttatccattcatcagttgaaggacatttgcttgtttccactctttgtctcttatgaataatgtagttatgaacatttgtgtataagattttatttgagcacttgttttaaatcctcttgggtatatatgtaggagtggaattgctatgtcatgcagtagaattctacgtttagctttttgaagaaatgacaaacggctttctaaagcagctgcaccattttacattcccatcagcaatgtgtgaggataatctccatatcatcaccaacacttgctgttttcttctttttttctttttgctcatattcatcctactgggtaggaagtggtattttactgtggctttgatctgcatctccctaaggattaatgctgttgaacgtcttttcatgtacttaccgaacactggtatatcttctttggaaaaatacctattcaagtcctttgcccatttgaaaactgagttgcttatcttttattgttgagttgtaagaattctttatatattttggatactagacccttatcagatatataatttgcaaaacattctctcccagtctgtgggttgtcttttcattatttggttgtgtcctctgatgcacaaaagttgtggggtttttttttttgttgttgttgtttgtttgtttttgagacagagtctcactctgtccctcaggctggagtgcagtggcgtgatctcagctcattgcaacctgcgtcccctgggttcaagtgattctcaggcctcagcctcccgagtagctgggattataggcagctaccaccactcctggctaatttttatatttttagtagaggtggggtttcaccatgttggccagacttgtctcgaactcctggactcaagtgatccttctgcctcagcctcccaaagtgctgggattagaggtgtgagccactgcacccagcctaaaaattttaaattttgatgaggttaaatttacttttttttttcctattgttgcttgtgcttttagtgttatctaaaaatcaattaccaaatcaagatcataaagagatatccctgtattcttctaagaatgttatagtcttagctcttagtgtttgaggcactttgacttaatttctgtagatggtgtgagataggggcccagttgcactcctttggatgtcgttatctggcaccatttgttgaaaatatgattctttcccccactgaatggtcttggcaccgttgttgaaaatcaattgatcatcgaggtatgagtttatttctggactctcgattctattccattgatttatgtctctccttatgaggtaggaggtgggacttgactccagaggcagggctcggacactggaccaaattgaggactagctgaaacagggctggggtggaatgagctttccgtaagacacgctcatcagttgccatgtcagtttaccgttgccatcgcaacaccagggggttatcccccgtctcttccatggcattgactcgatgacccaaaagttattacccattccctagaaatttttgcacaaatcaccccttaatctgcatgtgtttaaagtagatataaatgactgcaaaactgccctgagctgctagtctctgccagagccctgctgtgcaggagtaatcagagttgtaacagggctggagctataacactgccccttcaataaagctgttttcttctaccattggcttggccttgaattctttcctgggcaaagccaagaacctcatgggctaagtctcactttggggctcacttgtccaacattacttatgccaggaccacactgttctgattactgtagctttgtagtaagttttgaaactggaaagcgtgaatcctccaactttgttctttttcaagattgttttggctatttggaacctcttgcaattccatgtgaattttgagatcagcttgtccatttctgcaaaaaaaatggctcttaaaattttgacaagtggccgggtgcagtggctcacgccagtaatcccagcactttgggaggctgaggagggcggaccacccgaggtcaggagtttgagaccaccctgggcaacatggtgaaaccccgtctctactaaaaatacaaaacattagccgggcgtggtgtcacccgcctgtaatcccagctacctggaaggtggaggcatgagaattgcttgaacctgggaggcggaggttgcagtgagctgagactgtgccgctggactccaccctgggcaacagagcgaaactctctctctcaaaacaatttttttttgataggcattgcaactgaatctgtagatcaatttagggagtattgtcatcttaaaaatataaagtcttccagttgatgaacatggggtatctatttatttagctcttatttaatttctttcagcaatattgtagctttcagtgtaaaagtagaattgttttcttaatttcattttcagattggcattgctagtgtattgaaatacaactaattttcttttcttatttttcgcagagatggcggcgggggagggggggtctccctttgttgccccggctggtcttgaactcttggcctcaagcaatcctcccacctcgcctcccaaagtgttgagaattataggcataagccactatgctgagccctgattttcttttctttttttttttttttttttagacggagtctctttctgtcatcccaggctggagtacagtgacgcaatctcggctctctgcaagctccacctcccgggttcacgccattctcctgcctcagcctcccgagtagctgggactacaggtgcccgccaccatgaccagctaattttttgtattttttttttggtagagacgtggtttcaccatgttagccaggatggtctcgatctcctgacctcgtgatccgcccgtctcggcctcccaaagtactgggattacaggcgtgagccaccacgcccggccgagccctgattttcaatattgatttgtatcccaaaaatgtcctgaatttattaacctttttttttttttttgagacagtttcgctcttgttgcccaggctggagtgcaatggcgtgatctttgcttaccgcaacctcagcctcccgggttcaagcaattctcctgcctcagccttccgagtagctgcgattacaggcatgggcaaccacgcccgacccattttgtatttttaatagagatggggtttctccatgttgaccaggctggtctcaaactcccgacctcaggagatccacccacctcggcctcccaaagtgttgggattacaggcgtgagccaccacgcccagcgtcattttcaaattctcatctaaatgtttcatccagaagggttggatacaaaagggatggaagcatttcacagaagaaacatttttatacaagttgactagaaacacacatcacatccaggaattggtcaggatgaaattctaaattttcttctttttttttgtttgttaccagcttatatatcaagaaaagaagcggggcacgattgctcatgcctgtaatgctagcactttgggaggccgaggaggccggatcacctgaggttgggagtttgagaccagcctggccaacagagtgaaaccccgactctactaaaaaaatacaaaaattagccagacgtggaggcgcgggcctgtagtcctaggtacttgggaggctgaggcaggacaattgcttgaacctgggaggtagaggttgcagtgagtcaagatggcgctactgcactccagcctgggcaacagagtgagaccctgtctcaaaacaaacaaacaaacaaacaaacgaacaaacaaacaacagaaatcctaaattttcaaaatgtttttctataacctctttcccgatcatcatccaatgaacttcctgcaaaagctcaatccctttctggggaccgctgcatcagtaatcaaactgccttcctaaggtgtgtgttgtagcaggagagaagtggggaagtagagtcaggctacaggccacagttgcaacctacaactaatccagaaagttgagcacaaggcaacagaaatgaggcgtctcccaagtgtccaacctgtcagaagcagccagaggggtcacagtccctgagaggtgccctccttgaacttacagcttttggcaggaatcacaggttagaaatacattcgatggccaggcgcggtggctcatgcctgcaatcccagcactttgggaggctgaggcgggaggatcacctgaggtcaggagttcgaaaccagcctggccaacatggtgaagccccgtctctactaaaaatacaaaaattagccaggcatggtggcgtatgcctgtaatcccagctacttgggaggctgaggcaggagaattgcttgaacccaggaggtggaggttgcagtgagctgagatcacaccactgcactccagcatgggtgacagaaggagactccgtctaaaaaaaaattaaaaaaaataaaagaaaataaaaagaaagaaatatagagccaagaagccagttgattgtagatggtttcctcaaagaagaagccctttccttggcctggcgtggtggctcacatctgtaatcccagcactttgggaggccaaggcaggcggatcacgaggtcaggagatcgagaccatcctggctaatacggtgaaaccccgtctctactaaaaatacaaaaaattagccgggtgtggtggtgggcgcctgtagtcccagctactcgggaggctgaggcaggagaatggcgtgaacctgggaggcagagcttgcagtgagctgagatcacgccactgcactccagcctgggggagacagtgagactccgtctcaaaaaacaaaaagaagccctttcctgtgggcatttttatgtgatccagatggtccagtcagcatccatgatgttttcagtttaggtcccacggagggtgccctaagtctgcaatggtctcatagtcgaagtgctgttcctggagtgtgcgcccgtttttaatttagcacagcacatgctgagactgaaacagcacagagcagacagcagtatcaggttttggcttacagtcaggtccaggccagtaggatctgtgaattcaggaagccacaagtcagtggctgttctttggcagcagcaaagccaagatgctgcaggctagaaggttctgtttcaagtgcaagtgacaaacaaggctttcctaagcctttttacctcgtcaatcttagagctggaattggtgcactcaaaaacacgcacgggctggatgcagtggcttgtgcctgtaatcccagcactgtgggaggctgaggcgagaggattgcttgagcacaggagttcaagaccagcccaggcaacatagtgaaactgtgtctctacaaaaaaaaagaaaaaaaaattaaaattaactgggcgtggaggtgggcacctgtagtcccagttacttgggaggccgaggtgggaggatcgcttgagcccaggaggtcgaggctgcagtgagccatgactgcatcattgtactccagcttgggtaacagagtaagaccctgtctaaaaacaaaaaaacaaacaaacaaacaaacaaaaatgcataccttcaagaaaaagagaagacaaccacagaccgggagaagggatttgcagaagacatatctgataaaggactattattcaaaatgtacaaagaactcttaaaactcatcaataagggtggtgtgtgcctgtaatcccaactacttgggaggctgaggcaagagaatcacttgaacctggaagatggagtttgcagtgagccgagatcacgctattgcactccagcttgggcaacagagcaagactctgtctcaaaaaaaaaaaaaaaaggttgggggcagtggctcacacctgtaatcccagcacattgggaggccaaagtgggtggattgcttgagtccaggagtttgagaccagcctgggcaacgtggcaaaaccccctctctacaaaaaaataaaaaaacattagttgaatgtggtggtgtgcccttgtggtctcagctacttgggaagctgaggcaggaggatggcttgagcctgggaggcagaggttgcagtgagccatgatcacaccactacactccagcctgggtgacagagcaagactctgtctcaaaaaaaaaaaaaaaaaaaaaaaaaaaaaaggctgagtgtggtggctcatgcctgtaatcccagcactttgggaggccaaggcgggcggattgcttgagcccaagtgtttgagaccaacctgggcaacaaagcaagacctcatcttaaaaaaaaaagtattagccaggtgtggtggcatgcgcctgtagtcccggctacttgggaggctgaggcaggaggctcgcttgagcccaggagttttaggctgcagtgagccatggtctgatcatgctactgcacttcagcctcggcaacagagtgagaccctgtctctaaaagtgatctatcaagccatgaaaagacctggaggaaccttaactacatatcactaagtaagagaccaattaggtaaggatacatactgcatgattccatcaatatgacattctggaaaaggcaaaactatggagtcaatataaaatcagtggtcggccaggcgaggtggctcacgcctataatcccagcactttgggaggctcaggcgggtagatcgtttgaggtgaggagttcaagaccagcctggctacatggtaaaaccccgtctcaactaaaaatacaaaaaaattagccagacgtggtagcagtcacctgtaatcccagctactcgggaggctgaggtgggagcatctctcgaacccgggaggcggaggttgcagtgagccaagatcatgccactgcactctagcctgggtgacagagtgagactccatctcaaaacaaatacaaaacgaaacaaacaaaaagaccagtggtcctctggggttgagggagggaggagtgaactggtagagcacagaggacttttagggcagtgaaactagtctgtgtgataccgcaatggtagatacatgtcgttacacatttgtccaaatccagagaatgcacgacaccaagtgtgaccctaatacaaactatggagtttgggtgataaggatgtgtcaacataggttcattgattataacatgtaccactctggtgggggatgttgatagcgggaagggtgtgtgtgtgtgtgtgcgtgaggggctgggggaaacgggatataggagaactctgtactttctgctcaattttgctgtgaacctaaaactgctctaaaaataaagtctaggctgggcgcggtggctcacgcctgtaatcctagcactttgggaggctgaagtgggaagataacttgaactcaggagttcgagaccagcctgggcaacatagtgagaccttgtctctaatttgaaaaaaaaaaaaaaaaaacccaaaagccaaaaaaacaaaaattagctgggtgtggtggcacacgcacctgtaattccagctactcaagaagctgaggtgggaggattgcttgagtctaggaggtcaaggatgcagtgagatgagattgcactgttgtactctagcctgggcaacagagtgagaacgtctcaaaaaaaaaagcatattaaataaacgaaactttttcagacatacaaaaaaatatgcacaccaggctgcctcatcagctgcctttaagggtccagcatttgattttaacaagggcttattagcaaactagaaagtgttttttaaaactctaaaagtagctgggtgtggtggcatgtgcctgtagtcctagctactcaggaggctgaagcaggaggatcatttgagcccaggaggtcgaggctgcagtgagccatgatcgcgccactgcactccagcctgggtgagagtgtgagatcctgcctcaacaaataatttttttgctttaaagtgaaactccaaaagtttatttccatccagagattgcgtcgctctttttactgcttcttcctttctccaaaggctccagtaagccaaaatcatggcagaaatcatcgtttacagacactgtacttgttctgtttccaatactcagagaatttaaattccaatcctcccattgttggcaaaaagcaagggatttgttttatacacacacaatgatttttgcagctttccctaatccagatgatcctcatagtgtatagtgcaagcataaacattttacattgattttaaaaaatcatacgtttaggccaggtgtagtagctcacgcctgtaatcccagcactttgggaggccgaggagggtggatcacctgaggtcaggagtttgagaccagcacagccaacatagtgaaaccctgtctcaactaaaaatacaaaaaattagctgggcatggtggcacgtgcctgtaatgccacttacttgggaggctgagaatcacttgaacctgggaggtggaggttactgcactccagcctgggcaacagcgagactgtctcaaaaaaaaaaaaaatcatacatctagatgaaacagtcacaaaatacaaaggagcttttcaaatttctccctttttttttctcattgcaaacctactcaaatgtctatcaataaattcaacacttaatagttggaatagaaggcagggttgctgcaacctgtgggctgaagaaatgggtagaatctacagtcagcctttggtatccatgggattggttccagaaactcccatggatcccaaaatccacagatactcaagtccttatataaaatgcagtgatatttgcatataacctccacacatcctcccatatactttattaattattattttttcgtgatggagtttcactcttgatgctcaggctggagtgcgatggtgcgatctcgctcgctgcaacctccacctcccgggttcaagcaatcctcctgcctcagcctcccaagtaactgggcttacaggtgcccgccaccatgcccagctaattttttgtatttttagtagagatggggtttcaccatgttggccaaaacttacacacataaacacagactttgcatggtaccatttgcagttgagacaaatgtaaatcaatacaaagaggcagtgtgaaatcataattgcacgaaattaactgaagtaatactgtactactgtaataatttcatagccacctcctgttgttattgcagtgagctgaagtgttgtatcagcttaaacaccatgtgatgctaatcatctccaggagttcgtttctccagtaaattgcatagcgcagtaaacagtgatatcttccggttctcgttcatttttcatcctgttgagtgcaatatcgtaaaccctgaataacaccacgggacccatgcaaagtgccactgatgaaactgacagtgctcccaagaagtagacaagtcatgacattacgagagagttgatttgcttgatatgtaccatagattgaggtctgcagctgcagttgcctgacatttcaagatgaattcagcattgaggagcattgtaaaaaaaagaaaatgaaattcccgaagtggtcacagttatgccggcaagcaggaaatccttgcactttttgtgaaatacctttttatctcatactgaaaatgcaaagccaggtgtgatggctcacgcctggaatcccagcactttgggaggctgaggtgggtggatcacttgaggccaggagttcgagaccagcctggccaacgtggcgaaaccctgtctctaccaaaaatacaaaaatgaactgggcatggtggtgggtgcctgtaatcccagctacttgggaggttgagacacaagaatcacttgaacccgggaggcagaggttgcagtgagcccagatcatgccactgcactctagcctgggtgacagagcaagactctatcacaaaaaaaaaaaaaaaagaaagaaagaaaatgcagtttttctgtgggtgcagaattgctataagaaaggcatacttgccgagcacggtagctcacgcctgtaatcccagcactttgggaggccaaggtgggcggtcacgagatcaggagatcgagaccatcctggctaacatggtgaaaccccgtctctactaaaaatacaaaaaaacttagctgggcatggtggcgggcacctgtagtcccagctactcgggaggctgaggcaagagaatggcgtgaacccaggaggcggagcttgtggtgagccgagatcgtgccattgcactccagcctgggcaacagagtgagactctgtctcaaaaaaaaaaaaaaaaaaaaaaaaaaaaaaaaaaaaaaaaaaaaaaagaaagacatacctatagactctaatataattctagaaaagtgtagccattatatgacaacttaaagctaaaggaaggtgagggacataaatctggagagtttaatgccagcaaaggatggtttgataattttaaagagtttggctgaaaaaaatatcaaggtaacaggagaggtggcttctaccaaccaaaaggcagcagatgggttcccaggtgccaatgagaaaatcattgaggagaaaagttatctgcctaaagagggttttttgtttgtttgttttgtttgtttgtttgtttttgagacagagccttgctctgttgcccaggctggagtgcagtggctccatctcagctcactgcaacctccgcctcctgggttcaagcgattctactgcctcagtctcctgagtagctgggattataggtacccgccaccatacccagctaattttttgtatttttagtagagatgggatttcaccatgttggccaggctgatctcaaactcctgatctcaagcgattctccccacttggcctcccaaagtgctgggattacaggcaggagccacacctcgcctggtcatgaagaggtttgtaatgcagactaaagtgccctattctggaaaaaatgcctcaaaggacatttattagtaaggaagagaagcaagcacttaaggcaggtagggataggctgactctactgtttcgtgcaaatggtgtcagatttatgatgaggctgcccttacacagaaaactgctaacctccaagacttgaaagataaagctgccagtctttcagttgtacaacaagaaggcctggacaacaagaacccttcttctggattggttccaccgacgctttgtccttgaagttaggaagtaccttgccagttagttactttgatattagacagtgtccctggccaccaagaaccccacgaatgcaacaatgaaggtgccgaagtggtctcattgcccccaaacacagcatctctaattcagcctctagatcagggggtcataaggacctttaaggctcattacacactgtggaaaggactgtcaacactatggaagaaaagcctgatgtagagaacattagaaaagtctggaaggatgacaccactgaagaggccatccttgttagagaaaggctacaaataccattgagccaaaataataaattcctgcaggagaaaactgtgtctatatgttgtacatgacctcacaggatttataacagagccaatcaaggaaatcattaaagagattgtggatatggcaaaaaaaaaaaaaaaaaggtagggggtgaagggtttcaagccatggatcttggggaaattcaagagctaatagataccacaccagaggaattaacagaagattttttttttttccctgagatggagtctcgctctgtcacccaggctggagtgcggtagcaaaatctcagctcactgcaacctccgcctcccgggttcaagtgattctcctgcctcagcctcctgagtagcagggattacaggcacccgccaccacgcccagctaatttttgtagtttcagagacagggtttcgccatgttggccaggctggtctcgaactcctgacctcaggtgatccacccccatcccaaagtgctgggattacagatgggagccaccgtgcctggccagaagatgttaactgaagatgtttttgacttctttcacaacatggacccctctgtgatacaggaactgacactaaagcaaaccgtggaagaagttttggtgccatatagaaacatttttagagaaatgaaaaagcaaaaagtcagacagaaactatgatgtatttctgtaaagtacctgcctgtcctgcctccctctccacctccatcacctcatccacttttgccacctctaagacagcaagaccagccctcctcttcagcctactcattgtgaagataacgaggatgaagacttttatgatgaccacctccacttactgaatagtaaatgtactttctcttccttataatttgcttaacaacattttcttttctttagcttactttattgtaagaatacagtatataatataataacatacaacatatgtgttaattgaccatttatgttatcagcgaggcttctggtcaacagtaggctattagtagttaagttttgggggaatcaaaagttatactcagatttttttttttgagatggagtcttgctgtgttgcccaggctggagtgcagcggtgcaatcttggctcactgcaacctctgcctcctgggttcaagcgattctcctgcctcagcctcccgagtagctgggattacaggtacctgccaccacgcccagctaatttttgtatttttagtagagatggggtttcaccatgttggccaggctggtcttgaactcctgaccttgtgatccacctgccttagcctcccaaagtgctgggattacaggtgtgagccaccacatccggctatcctcagatttttaacagcaaggaaggtcagcaccccaaccgtcacgttgttcatgggtcaactatataatatttccacatcacttcattctcacggattcaacatggtacttggcatggggcaaattcaagtttttactttttgaaactttgtggaagtttttttccccaaatattttctattctttttttttttttttttttttttttttgagacagggtctcactctgtctcctaggctggagtgttgtggtctcaatatcgggggctccagtgatcctcccacctcagcctgtcaagtagctgagactacaggcacacgctcccccaccacacccagctaattttttaaatttttttgtagagatgggtctcactatgttgcctaggctggtcttgaactcctgggctcaagcaattctcctgcctaggcttcctacagtgttgggattataggcgtgagccaccacatccagtctttcccgaatattgtcttttgtttgagacagagttttgctctgtcacccaggctggagtgcagtggtgtgatcttggctcactgcaacctccgcctcccaggttcaggtgatcctcccacctcatgctcctgagtagctgggactacagacgtgtgcctccatgcctggctaatttttttgtttgtttgtctgtttttgagacaaagtctctgtcgcccaggctggagttcagtggagcgatcttggatcactgcaacctctgcctcccgggttcaagcgattctcctgcctcagactcccagacagctgggattacaggcacctgctgccacgactggctaatttgcatttttattttatttatttattttttgagacagagttttgctcttgttgccctggctggatagcaatggcgcgatcttggcttacggcaacctctgcctcccaggttcaagcaattctcctgcctcagcctcccaagtagctgggattacaggtgcccaccaccatgcctggctaattttttttttttgtatttttagtagagatggggtttcgccatattggcctggctggtctcgaactcatgacctctggtgatccatctgcctcagcctcccaaagtgctgagattacaggtgtgagccaccatgcccagcaatttttgtatttttagtagagacggggtttcaccatgttggctagcctggtctcgaactgacctcaagtgatccacctgccgcggtcccccagagtactgggattacaggcgtgaggcaccaggcccagcctcccgaatatttccaatctacagttggttgaatccacagatgcagaagctagccacatggagggccaactgtgtatgtttatcttattctttttttcccatctggcttatcgaaagctttgagctggccggcaatagatttaatttcttttactcccagttggaggaaagagcacctataaactgtttactgtctttgacccaccaaaaactcattttgggaaagtcttggccctttctcttgcagcctacagaagagagggaaaaaagccaaaggtgtcacttgggccatgcttttcttcctcattgtagccagcactcaccaaaatcagccaggggatccagggagtcagctctctagaggctggacctattgtcttttttttttttttaatttgagacggagtctcgctctttcgcccaggatggagcgcagtgatgcgatcctggctcactgcaacctccacctcccggattcaaacgattctcctacctcagcctcccgagtaactgggattacaggcgcgtgccaccatgcctggctaattttttgtatttttagtagagacagggtttcaccatgttggccaggctggtcttgaactcctgacctcaagtgatccgcccacctcggcctcccaaagtgctgggattataggtgtgagccactgcgcccggcctcagctagtgtttgctttcgtacagttttccctcctcaactgggactacttatgattctcaaccaaggcagtaactctgcatttctattaaaaagatctgaagtggttttggcaaaataagaaatttattacatatgattggcagatacatgctgctgatatattattcttactgtttgaaaaaaagtcaaaataaaaataatgttattttaattttaaataccacacaattacaggtccttgaggatcagggttgggctcagggaattacctcgttttttcagagaaaccagagtgggcagaaccatctccaaattcttttttttttttgagacagggtctcgctctgtcacccaggctggagtgcagtggtatgatcatggctcactatagcctcaacctgggcacaaatgatcctcccacttcagcctcccaagtagcttggactacaggtgtgtactactgtacctggctaacttttgtattttttgtagcgatgggggtcttactacattgcccaggctggtcttgaactctggggctcaactgatcctcccaccttggcctcccaaagtgcagggattacaggtgtgagccaccctgcctgatccaaactttttctttttgagacggagtctcgctgtgttgcccaggctggagtgcagtggcatgatcttggttcactgcagcctctgcctcccgggctcaagcaattctcctgcctcagcctcccgagtagctggaattacaggtgcacaccaccaagcccggctaattttttggatttttagtagagacggggtttcaccatgttggccaggctggtcttgaactcctgacctcaggtgatccgcctgcctcagcctcccaaagtgctgggattacaggcatgagccactgtgcctggcccaaactttttttttttaacgtagactttcagctgcatgacctggtcccagccctgtagctcggaagccccaggaggtgaggttcacacccttagggctgggactctctgagccctaaggatgagattctaagttcagagatgagttgagggcttccctgaagggaccaaggaagtccctgtggcagaaacaacaggagacaagaggtcagtggtgcggaggggaggggatggtacagaggggcctggggctggatcggagggttttggttgggaggagaagagaggggagggcaagaattcttctccaggatgggcattcccccatgctcacttgtgggtttcccctcagtacagtagggcccccccgcaaagcagcagctgcagtaggtagataagatggaagaagcttcttctggtagtttctagaacctgaagacagggcccgtcagggcctttgattggacccaggaattctcagtatgccagggaggtacaagtgcttggttggttaatgaggggtcccagccaatggtcccaggccctggaaggcacagtcaggctgtcttgcaagaagggtagtgctggactaggacagacggactcgcacgatcacactggagttggtcacacgggctccatagtggccagcccagaactgtgtgtcctggccccggtgttcgaaagacacaaagcggacgcccatcttgatgttggagaacacgtgggtgacctgtaggcagaggaggggctcagctccattgtgccacagcctcccctccaaagctgaggttagggccttctggaagatggttattttccaaggatggctataaaatctccaattgggccacatgttcttctagaatcttatagaatcttccactccctcattaaaaagtagaatctggtcgggtgcggtatggctcgtgcctgtaatcccagcactttgggaggccgaggcaggtggattgcttgaggccaggagttcgagaccagtctggccaacacggtgaaaccctgtctctactaaaaatacaaaaaatattagctgggcttggtggcacgtgcctgtagtcccatctactcgggaggctgaggcaggagaatcacttgaacctggcaggcgaaggttgcagtgagcagagatcatgctactacactccagcctggatgatggagcgagactctgcctcaaaaaaaaaagaagtagaatctaactcccttccccatgaatcaaggtgggtttgcttgtcaccaagaatgtggtgaaaatgatgctcagtgactttggccaagtgactttttaaggctaggtcagaaaaagcaaggcagcttctactgtttctctggaaccctcctccctgagcaaccacatgagcaatctgactgcctaggagccgccatggtgtgaggaagcccaaaggagcccaagcagagagatcccatggagaagctctgagactaaatgaagaaagagatgtttggccagccaccaacagctacacacatactacccaccaccctggcctgcagctccaggcatcatcagaatgtcactgtctgaacgctgaaagacaggagccagaactgcccaggtaagccctcctgaaattactgactcacagaaatcacgagaggtagtcaaatgactgtcattgattttttttttagacagagtctcgccccgtcacccaggctggagtgcaatggcgcaatcttggctcactgcaacttctgcctcccagattcaaacgattgcctgcctcagcttcccgagtagctgggattacaggcatgtgccaccacgcccagctaatttttgtatttttagtagagatggggtttcaccatgttggccaggctggtcttgaactcctgaccttgtgatccgcctgccttggcctcccaaagtgctgggattacaggtgtgagccaccgcacccagccagactgtcactgattttaagccactaagttttggggtgatttattttgcagcaataggcccccagcatcctttccccaaacccccataggagactcacgtgaaggcaggcattgttgttccactgcgggatgggatcaggcacagcagagaatttatctagaacagtctggttggcgtctagaagttggacgaggagtctgtacatacagccgctgtcgtgtcgggctccccacctgtgggaggaaggagccatgaaggctggacctgccaccccatctctttgggtgtctgcctaccttgtccgaatgcccttcccatgtgtgcaaatccagttcctctaaagagactcctgggaggtgatctctggacctttggaatgttgtgtcagacaggagtgtctttgatggggacccaggtggtactggataatctaccaatatgatttagggcaggggccagccacactcatataaatagtctcagtggggagtctccggaaagacccacaatgtgactttcggtgggggctgggagtcagggaacgtcagttgacctggaggctgagattaaccacgtgggcaatcgatcaatccatcaggccttgtgatgaacccaagaaacactctggacaccgaggctcaagtgaactcccttggtcaacaaaattccatgcatcttgtcacacatcagtgccagcacggtaacatgtcctgatgccatgggagaaggacaacagaagctctgtgtttgatcttttccctggatgctgctctatgccctccttttcttggctgattttaatctgtatcttttccctgtaataaaccagaagtgtgtagtagctttctgtgagttcgtccagtgaattattgaattgtgaaggtggttttggaagtcctccaaacttgtagttggtaaagatgtagagatggggttttgccatgtgacccaggctggtcttgaactcctggactcaggcgatcttcctgcctccgcctcccaaagtgttgggactataggcgtgagccaccatgcccagtcagattttgtttttaattattactcatcaaactacataacatatttgtgttgttgtgacatatcatgtcagaagcgaggatggtcttagggattccatccccgaactttgtagcaagctctaaacttctcacaaatattgatgcctgtctgggcgaggtggctcacgcctgtaatcccaacactttgggaggccgaggtgggtggatcacttgaggttaggagttcgagaccagcctggccaacatggtgaaaccttgtctctactaaaaatacaaaaattagccaggcgtggtggcaggtgcctgtaatcccagctacgaggcaggagaatcgctggaacccaggaggcagaggttgcagtgagctgagatcgcaccattgcactccagcctgggcgatagagggagaccctgtctcaaaaacaaaaaacaaacaaatattggtgcctggctctcaccctcagatgctcagatttaatgggtatgaatggtgcctgggcattttatgttttaaaagctacctttatgaggtgcggcaaaatttgggagccactgattatcacaatcaaatagtacccactgatcaaaacaacacaaatatgttacatagtttgataagtaataacaaaaaataaaatctggccagccgtggtggctcacacctgtaatcccagcactttgggaggcagaggtgtaaggactgcttgaatccaggagttcaaggccagcctgggtgacatggcaaaaccccgtctctacagaaaatatggctgggcatggtggctcacacctgtaatcccaggactttgggaggcagaggcgggcagatcacctgaggtcaggagttcgaggccagcctggccaacgtggccaaaccccgtctctactaaaaatacaaaaattagccaggcgtggtggtacacacctgcaatccgagctactggggaggctgaggcaggagaatcacttgaatccagaaggcagaggttgcagtgagctgagattgtgccattgcactccagcctgggtgacaagtgaaactttgtctcaaaaaaacaaaaaattcaaaaattagccaggcatgtaaaattagccagtatgcacctgtagtcccagttactcaggaggctgaggtgggaggattttttgaggccaggtggtagagattgcagtgagccgagatcacgccactgcactccagcctgggtaaaagagcaagactctgtctctaaaaaaaaaaaaaaaaaaaaaaatcttattggagatgtatctcttaatgagatggagttggggaatagggttatggtgccttgattaagagtgaatttgctggccaggcacagtggcttatgcctgtaatcccggcactttaataggctgaggtgggcagatcacctgaggtcagcagttcaagaccagcctgggcaacatggtgaaaccccatctctactaaaaataaaaaaaaatagccaggtgtggtggtgcacacctgtaatcccagctactcgggaggctgaggcaggagaatcacttgaatctgggaggtagaggttgcagtgatctgagattgcaccattgcactctagcctgggccacctagtgagactctgtctcaaaaaaaaaaaaaaaaaaagtgaatttgctaaggccccaaatttccaatggccactttgcctggctccccagtagtccttacatctggggaccacaccttagtgaggggcttttttcctataaaactagagaagggggacactgagaaagagattggggaacgagaatcatatgatacttcccacacagatgtaacctatagcagattaattgtgtaatagggggctcatggctgtagtggacctggaatttgactcccataaaaccatctgggtcatatatcccctggaaagtcttcatgcaccccagtttcaagaccatcactacagaggacaagctctggagtcagaatctgactctgagccttatgccaggttctgccaagcccaggctgtgtgaccagaccagggcaagtcatctcccctttctttttttgatggagtctcgctctgttgcccaggctggagtgcagtggtgccatctcagctcactgcaacctccacttcccgggttcaagtgattctcctgcctcagcctcctgagtagctgggactacagacacttaccatgacgcccagctaattttttgtatttttagtagagatgggttttgccatgctggccaggctggtctcgaactccttagctcaagagatctgcccacctcggcctcccagagtgctgggattacaggcatgagccaccgtgcccagactgccatctcccctttcccaacctctcaatttcctgagaagctctgaatgatctgagggcttgaaatacaccttcccacaggatcaaggttcaaaaaaaggtgctcacataaagtacttgctatgtgtttgccatataataattgtcattgcaagagccctatcttgtaaacaggggaaacagaggtatgctgtgacttgcccaaggctacaaagccacagagctagggtttgaatctgggaggtctggctccagaacctaagctcttggctaactatgctgttttctcctcctaaggcaaggagcatctcattcattcacagacaagactgagctgggccaaaggtctctgtactggatctcatcttctgtcttccaatccacatccttttgggcatgagcagaaagtgtgtactctgctaattactagaactgtgagtgtgtttttcacttcacctccctgaacttcagtttcttttctttcttttttttttccaggactgagtctcactctgtcgtccaggctggagtgtagtggtacaacctccacctcctgggttcaagtgattctcctgcctcagcctcccaagtatgtgggactacaggtgtgcactaccaggcccggctaattttttttttgtatttttagtagagacgaggttttgccatgctggttgggctggtctcgaactcctgacctcaagtgatctgcctgcctcgaccccccaaagtgctgggattataggtgtgagccaccatggctggcctgaacttcagattttttatctgtaaggaggggttaggaggcctaaattaagtcacccataaaaaggccatgtcacatgcagtcagtgcttagcaaggggctattttaatcgtcacactcaccagtcagagacacaaatctcaatcctgccactatccagcagttctggccacagaccctcctcctctaggtccaagacctgcttcttgcaacaccagctgggaatgcaggagacagggtaatgagaacaggcaggcctttctcaacaaggggccggacctttggatagcaggggcattcacctgaatgaagtcacgaagcacgtctgagaaggggccccaggcacggttgtcctgttttcctccaccacccagccgtccccaccgtgttgcaccatccactttcggaggccttctgtgaaataaaaaaggcttgtgcccaagttccagtcgcccgcctgttggttcctagtgagaccccgcccctagcccctcccacgtgctcacagtgcagctcactcacctgacccttcccaccgaggccccgcccccttcccctcccaccagctcagggcaaagccccgctcctctggcccttctcactgatttgcagcaaagccctgcccctccaacccctctctcgggctcccagaactgccccactcccacccctcccacaggcaaacggtgaagccctgcccagtcagccctgcaccctgcgtgccaatgctgcctcgtccctccgacacctcccaccggctcccaatgctgccccgcccctccggcacctcacaccggctcccaatgctgccccgcctctccgactcctcccaccggtcccactgcggccctgcccctgcggcccctagtaccggtcccagtgcggccccgcccctccggccccgctaccgctcccactgtggcccagcatcctggacttcctcttccgagatcccaccttggccgcaggggttgcgaataaggttgcgtccgatgggtctgcgcgcgcagaagcggcccagggggcaaggcctggcgttacgggcgggagactggcagctgcgggcgaggtgcagcagcgcgcggccggtggcgccgtggtcgcgggccaggatcagcagccacagggcctggccgtccaccagggctcgccagccccggcacacttggcggcagcgcccgagcagcgtgcgcggggggacgtggctcagcaccaccagaagcagctctgggggtagttggctcaggtccagcgcctcttcgggttccggctccggcgcggggacccgggcggcccggcccctggagaccgaggcgcccatggtccccccgccaggcccggctgtggctgcgggagaggaagggtcaaggcgtcagggaccagcagcctccgcggcgcgcagcctctgcctgccctgattctgccagccgcacccccgtcttcaccatccctgggccccgtccccaagtccccatcccccagcccgtccttgatagccccgatatcccggagaccccgcggtctgtgtgtatgccccgaattgcatgcaatcagcccccctcggcggccgcaccgacaccgcaccccaagtcctaccccggggcctggcggcgctcctcgccgggatgccctagctgtgccgcaagctccccacgcccctctgcgtcctttttactcgccggcccctcccctcttactagccagcttcacccacccctgcatcctctttcttactcgccagcccctcccgcctgctccctcccgctctccaaacccaacctgcttcccgcgacggggccaggtgcagccaggagccaaggcctgctgctcacagccgtcccctccagccggccccttgaagtgtccctaattcgttagtagcaatgagacgtctggctctgagcaaccattgttattttggtcaggcttctgagtgggaggcctcgtatccgttaacgtgttaaaaaatttccatcacctttaaggtcgggcgtggttatcttcatttcacaggagaaaacaggctccggctgctaaaaattaatgcaaccaatagtaacaccagccaacttttatggacggttttactgccagccagggtggcaaccccatgaagtaggtgctgttatgccctttacttcacaggtgaaaaaactgagaccagcagaggccaagtggcttgtctatgatcaccagctagtagggatttgaatccagccagcctagctccggaattcctcattttaacctctagatcagctctgtccaataaaaatacaattgtggctgggtgcggtgactcatgcccgtaatcccagcactttgggaggccaaggcaggcggatcgcttgaggtcagaagttcgagaccagcctggccaacatggtgaaaccccgtctctactaaaaatacaaaaattagctgggcgtggtagcacgcgcctgtaatcccagctaatttggaggcttaggcaggagaattgcttgaatccgggagggggaggttgcagtgagcagagattgcaccactgcactccagcctgtgcaaaagagtgagtgagactccgtctcaaaaaacaaacagaaaaaaaaaattgtgaaagttgatcatgtgaattggatccttcttgtcatatccaactaaaacaaagttgagaggccggggggaaaacacttagggcagataccattgctccaagaaagtgattctctgcaagcctggctgttaaaactgcctgttgtaacctggaagcagtctaactggtactgaaaaaacctgccgtgactctaagactagtttttccctctgctgtcacttaccagtcagaacttgccagctccccagaacgttgctagtgtcaatgaactttcttgcaaaacaatacctaacatttctgtttcttataaaaacctctaacctctttgttctttgaaagttctgaagaccgcctggtctgtgtggatgcctcgaatgtcaattcttgcttcccaaataaaacattttattatttttttgagacagagtctcgctctgtcgcccaggctggagggcagtgatgcaatctcgtctcactgcaacctccgcctcatgggttcaagcgattctcctgcctcagcctcccgagtagctgggattacaggcgcatgccaccatgcccagctaatttttgtatttttagtagagacggggtttcaccatgttggccaggatggtctcaaactcccgacctcaggtgatctgcccgcctcagcctcccaaagtgctgggatcgcaggcatgagccaccgcaacaaaacattttaaatcgagagatttgtctctatatctctatattttatttggcttcgacataacgtgagctgtatacatagtttaagacatcaacaaacaaaaccagacatggattcttccccacaaagaacttaccttctagagggagagacatgataaacagttggcataatgagcaaattacgtagtatcagggaaataattaaatataaaacctccaggccgggcatgatggctcacgcctgtaatcccagaactttgggaggctgaggcaggcggatcacttgaggtcaggagtgtgagaccagcctggccaaaatggcgaaactccgtctctactgaaaatacaaaaattagccgggcatggtggcgcatgcctgtgatcccagctactcgggaagctgaggcatgagaatcacttcaacaagggaggcagaggttgcagtgagctgagacctcaccactgcactccagcctaggcgacagagtgagaagctgtcttaaataaataaaataaataaaacctccttttgaccctcttagaatcctctccacaaatgcagaaaagaattaaatgggtcctggcatgggggctcacacctgtaatcccagcactttgggaggccgaggcaggaggatctcttgagcccaggagtttgagaccagcgctggcaacacagtgaaaccccgtctctacaaaaaatttaaaaagtagctgcaaatagtggtgtgcacctgtagtctcagctacttgggaggctgaggtgggaggatggcttgagcctgggaggttgaggctgcagtgagctgtgatcatgccactgcacttcagcctgggctacacatcgagaccctgtctcaaaaaaaaaaaaaaaaaaaaaagaaaaagaaaaagaaaacaagtaaaaaaaagaatgaaacggttgtattagtgtatacacttcaaactagcctgtaatgtgcttctgtcatgatgaacagtaaacataataagtgtgtgtgtgttaaaaagtgattagtgctgtgaaaaattagagcagagaagggaaatggggcataacgaggctgggttgggtggataggagagggagaccctgaattaggagagatggatgaactattatgctggtctaatttcttctcaatatgtatattttcatttttaaaattttgtttcaactggacacggtggctcacacctgtatcccaacactttgggaggccgaggcaggtggatcacctgaggtcaagtgtttgagaccagcttcaccaacatggtaaaactccgtccctactaaaaatacaaaaacctaggtgcagtggcttatgcctgtaatcccagcactgtgggaggccgaggtggcagatcacgaggccaggagttcgagaccagcctggccaatatggtgaaaccccaactctactaaaaataccaaaaaaaaaaaaaaaaaaaattaggtgggcatggtggtgcgcacttgtagtcccagctactcaggaggctaaggcagaagaatcacttgaacccaggaggcacaggttgcagtgagctgagatcccaccattgcactccagcctgggcgacaagagtgaaaatttgtctaaaaaaaactgtttatatatatatatttgagaccaggtctcactctgtcgtagctcactttagcctcaaactcctggagtcaagccatcctcctgccttagcctctggggtagctgggactaaaggagagacaaggtcttgctgttgcccagggtggtctcaaactcctgagctcaagtggtcctctcgcctccacctccccaagtgctgggattataggcatgagcaactgtgcccactaaaactaatatattagttttaatgtaatatataagcagtgggaatcttgttgataatgagatatgatgactcaagtatttgacttttttaaaaacttttttcactttgtcatccaggctggaatgcaatggcttgatctcaaactcctgacctcaggtgatcctcccgccttggcctcccaaagtgctgggattacaggcatgaaccactgcacctggcctgattttttttttaacagttaaaaggtttaaaaagtttgagtaggttggccagggactgtggctgatgcctgtaatcccagcacttttggaggccgaggcaggcagatcacttgaggtcaggagttcgagaccagcctggccaacgtggtgaaaccccatctctacttaaaataaaaaaattagctgggtgtggtggcacacacctatagtcccagctactcaggaggctgaggcaggagaatcgctcaaacctgggaagcggaggttggagtaagttgagattgagccactgcactgtaacctgggtgacagagcaagactccatctcaaaaaaaaaaaaaaaaaaaaaaaaattccaagtaggtcaaaagggcagatactgaaaagtcagtgtccttttccagtccctggttctcctcccaagggcaagactcttggtgtccaccccaaagacaccacacccagacaggattcacccatctctctgagggctgctacctgagagactttatctgcaaataagatgacctttgttcttagtgcagttctgcccttcaccctaccttagcttgtcaccaccatggtccagaagcctcctagcccctatctatttctgtatctcaaaatgctatttaagcttcaaccatctggaccttctttgaatctcatactttgtggggtttctctgtgtgtgcacataatggatttgtgtgccttttctctagttcatttgtctactgtcaagtttatttcagagactcaaattatcaagccttcagagacggtggatggaaagtttcacttgtcccttcacttgttaaaaattttataaagttcttttgagatgaagtctcactctgtcacccagtttggagtgcagtggtgtgatcctggctcactgcagacttgacctcccaggctcaagccatcctcccacctcagcctctcaaagtgctgggattgcaggcatgagtcaggtcactgcagctgtgacctcccagcctcaagtgatcctcccatctcagcctctcgaatacatgggattataggcacagctatagtcccaccatgtctgggtaattttaaaattttttttgcagagatggggtcttgctacaatgtccatccagtctcatctcaaactcttggcctcaagtgatcctcctgccttggtctcccaaagtgctgggattacaggtgtgagccatcacactggccttgtccctatactttatagccagaaaagggctgaggaaagcagaaacagagaacaaaaaaacggattggcactttcaaaattaccttccttgtaatggataaagcagagttgttcttcagttcagcaaaccaggaaatctcttaattcaggagggccagctgtgggttttatggagctgttgcttcagagactccacacagagggggaaatgttctagagatataccaaaccccctggggattccaaatcatcaggcccacatttgtaacaaactcccagaagatgccaaagcctatgctcccaggacgaagcattgagtagctgaatcttacaggaatcaagccaaacatcccttgcatgttgatacacatttttttttttttgagatggagtctcgttctgttgcccaggctggagtgcagtggcacgatctcggctcactgcaacctccgcctcctggcttcaagtgattctccttcctcagcctcccgagtagctgggattgcaggcacacgccaccaggctctgctaacttaaatttctctccttttatttcccctttaccttatagttagggcattttggagctaggttttattatctaagtgtttcatttcaaggtaagaaattatttgctatacatcgggagcactggctctgatgaggttgagcaacactgatgcaaagcaaacgtgagtgggggctgcagtcttctctctctgctaggggtgtgggtgggaagctggggaaagtcctgctggtccagtttgcagaagtagaaatgtcatggacctccgggaacagagaagtgggctgcacgactaattccaagggtgttagaggttccaccaatgcggctttctggactacagctctccctggaggccattgttaacaggattagagtgaggtaggaggcgggactcgactccagaggcgtggcttggacaccagatcagactgaggacttggtagaacagggcggtggaggacagcaggagggtgggaagcagttttatttatttatgtatttatttatttatttgagatggagtctcgctctgttgccgggctggagttggtcggctcactgcaacctccgcctcccaggttcaagcgattttcctacctcagcccctcgagtagctgggactacagtcatgtgccaccacgctcggctaattttttgtgtttttagtagagactgggtttcaccgtgttagccaggatggtctccatctcctgacctcgcaattcgcccgcctcagcctcccaaagttatgggattacaggcgcgagccacggcgcccggccagctttctattattattattattattattattattattattattattattattaagacagagtcttgctctgtcggccaggctggagtgcagtggtacaagctcagctcactccaacctctgcctcccaggtgcaagcgattctcctgcctcagcctcccgagtagctgggattacaggcgcaccccaccacacctgcctaattttgtatttttagtagagacggggtttcaccatgttggccaggctggtctcgaactccagacctcaggtgatccactcacctgggcctcccaaagtgctgggattacaggtgtgagccactgcgctcagccggaaacggctttctatgagacaggcccaccagtgtgccatgtcaatttactatcgccatggcaacaccacgagttactgcccctttccacagcaatgacccaatgattactcctccttccctagaaatttctgcatgaaacgccccttaatctgcatgcaaaattaaaagtgggtataaatatgactgtggaactgccctgggctgctactgcctgcctatgaatagccctgctctgcagtagcgaccaccgagctgtgacactgccacttcaataaagctgtttcttctacctctggattgcccttgaattctttcctgggtaggccgggcgtagtggctcatgccttattcccagcactttgggaggctgaaggggaggtggatcatttgaggtcaggagtttgagaccagcctggccaacatggcgaaaccccatctctactaaacatacaaaaattagccaggcatggtggtgcacacctgtagtcccagctactcaggaggctgagacaggagaatcgcttgaacccaggagatggaggttacagtaagccgagatggcgtcacactgcactccagcctggttgacagagcaagactccatctcaaaaaaaaaaaagaaaaagaaaaccttgacaaatagagccagggaacgccataaagacagagttctcatgtttatacgcctgataacaaaaatgattacaaaagactctacagaaaccataaacttgcccaaagggcattacaactttacacaaaaaatggttctacaaagccctccgtggaagagctgcctgtctgacctcgaacgggcatcaccctcgattttgatctttgtagtcaaggataattatttcaaaacaattatgtactcctcattttttcttgtaagagcctttgtcttcctttaccttcctgaatctgcacatagttcactatggcatgcagattctcattgcagtgctgtattcccaaacaaacatcttttctctctttttttttgagatggaatctggctctgttgcccaggctggagtgcagtggcgcaatctcggctcactgcaacctttgcctccccagttcaagtgattctcctgccttggcctcctgagtggctgggattacaggcgcccaccaccacacccaactatttttttttgtatttttagtagagatgggatttcaccatgttgatcaggctagtcttgaactcctgacctcaggtgatccgcccacctcagcctcccaaagtgctgggattacaggtgtgagccaacgtgcctggtgcaaacatctcttcttttatagaacctctctctgtttgttaattaggttcacactgcagcctcaatctccctgggctcaggtgatcctccagctgagcctcccaagtacctggaactataggtgtgcaccaccatgcctagctaagttttttattttttgcagagacaaagttttgctatgttgcccaggctggtcttgaactcctgggctcaagtgttctgtctgctttggccttctaaattgctaggatataggcatgagtcactgtgcccagctagcttctttttctcttcttcttctttttcttgtgatggagactcgctctgtctcccaggctggagttcagtggcatgatctcagctcactacaacctctacctcctgggttcaagagattttcctgcctcagcctcccaagtagctgggattataggcacccaccaccgtgctgggctaattttcgtatttttagtagagatgcggtttcaccatgttggccagagtggtctcaaactcctgacctcaagtgacccactcacctcagcctcccaaagtgctgggattacaggcatgagccaccatgcccagctccagctggcttcttataattataaaaactaaatattttggagtctattaatacacgaaaattatgggaaaacatgtttgtaaagttattaaatgattttcgtttataaaatactcatatgtgacaggcaatgcaatatttcttgcttcccaggttttcactaaaatttaaggttactgtattagtccgttctcaagttgctatgaataaatacccaagactggataatttataaaggaaagaggtttaattgactcacagttcttcagcatggctgggcaggcctcaagaaacttacaatcatggcaaaaggggaatcaacatgcccctcttcacagggcagcaggagagagaagtgctgagcaaaaggggaaaagccccttataaaaccatcaggtcttggccaggcgtggtggctcatggctgtaatcccagcactttgggaggccgaggcaggcagatcacttgaggtcaggagttcgagaccaacctggccaacatggtgaaaccctgtccctattaaaaatacaaaaatgagccaggcatggtgggacacacctgtaatcccagctacttgggaggctgaggcaggagaattgcttgaacccaggagacagaggttgcagtgagccaagactttgccattgcactacagcctgggtaacaggtgatagagccagactcctccaaaaacaacagcaacaacaacaaaaggtgaaagcatttgctttttctcctcacttgattcctccaaaatctggaaactcttcgtgagtattcttatttttatttacataagttcagaaaaagtctgccctttctttataagcaagatataatagaaaacactggctatatcaccaaggctttgactgaagtgtcatattttattttaattaattaattaattaatttatttattgagaccaagtttcactctgttgcccaggctggagtgcagtggcacgatctcagctcactgcaacctctgcctcccaggttcaagtgattgtcctgccttagcctcccgagtgctgggatcactggtgtgcaccaccatgcccagctaatttttttttttttttgtatttttagtagagacagggtttcaccatgttggccaggctggtctcgagctcctgacctcagatgatccactcaccttggcctcccagagtgctgtggttacaggtgtgagccaccatgcctggcctgaagtattatattttaaaatatacataaatgcctggcttcaagagttcccagtcttacaatgaatgagtaaaaatggcccctttctggcaggcccaagaaccttaagaacctgttggtaaaatctaaagtctgccttggtttggcttctgagcctcaagaggtttctaaatctgagattcctatatgataaatgtggagagaaaaagttacatttctaaagaaaaactataatatacctattaatagattgcagccctgtgcactgtttttaagttcttgttatctacctatagactggacgagttcctgaattctcctgacttcctccaatatattgctacaactctctgactaaaagcaacggctggatgggcgaggtggctcacgcctgtaatcccagcgttttgggaggccgaggtgggcagatcacttgatattgggagttcgagaccagcctggccaacacagtgaaaccccatctctaataaaaatacaaaaattacccaggcttggtggcatgtacctgtagacccagctattcgggaggctgagacacgagaactgcttgaacctggaaggtggaggttgcagtgagctgagattgcgctgctgcactccagcctgggtaacagaaaaaattctgtctaaataaataaataaataaagtaaaagctgctctgtttccaaagccctatacgctgaaatgagaccaattttaaggaacaaactttgtgcccaatgtatgggccacacaaaagctcaccaaactgtctgacatcatgaccaaagacacacaaagtgaaaatcagaagttgatgttttcacactgcagacagcttttcccaagacatttggaagaagactaactcataataagatttgtaccccctcaatgctatctttttcatttggcaggataatgatgtagttgaaatttcatgaccaatagcttccattggcaacttaacaaaacctaacttaagaaatcctttagtatccattggttaactaagacatgtctgcgctattgctaatactacatgctgtacctgtagtacaggccagttcttccgggaaaagttgagatccatatacataaaagaagaaaacagatcacttggttacagttggtctcacctaatttcctaaggccttttgattcattcaattcattctgtaagcctatgaagttgtctgaaagcattatgaagagtggaattttcatattactactaattttactttgtatttctccattttaaaaccctgtatgtgtaattcgagcactttgtggggctgaggtgggaagattgcctgaggccaggagttcgagaccagcttaagcgacacagccaggccccatcgctagaaagaaaaaagaaaattagctaggtatagtggcatgggcctgtagtcctggctacctggcaggtgagcaggaggatcacttgggcccaggagttggatgctgcagtgagctaggatcataccactgcactccagcttgggcaacaaagcaagatcctgtgtctaaaaaacaaaacacaaaaccaaacaaaacaactttgtatgttgttaaatttttgcattaagtacaactcctaacaaaataatgttggcctaacattttgagatgttaataaaagactacagaacagataaaactgaacttaataacggacaccatgaaaacttagtctgagagccactcccgtcacacttcccttgttgttcaaatatgttgtttttttcagttccttctcaggctttagattaaaagggttttgaggctgggcgcagtggctcatgtctgtaatcccagcactttgggaggccgaagcgggcggaccgcttgaggtcaggagttcgagaccagcctggccaacatggtgaaaccccatctctactaaaattgcaaaaattagccaggtgtggtgatgtgctcctgtaatcccagctacacaaggctgaggcaggagcatcgcttgaacctgggtgatggaggttgcagtgagccaagattacgcgactgtactccagcctgggcgacagagtgagtgagactgtctcaaaaaaagaaaaaaaaaaaaaggagaggggttgatagggttttgatactgacttctagacaccagtcactcccccacaatatgcattgagatcagcaattgggacaggtacatcacagcatcaagatacatcaaaacccaaatacaggatgatcaatcagtgatgcttttggagaaagatcttaatcaaaaaggggaaaggtgaaagttgtcagagtcactatggagtcactaatattaagaaaaccctgaaaaacagagctggggaaggccatgaagagagggttctcacacttgtgtggctgattataaaactatcacaaaagactgcaaaaaccacaaccttggccaggcacagaggctcacatctgtaatgccagcactttgggaggctgaggagggaagattgcttgaggccaggagtttgagaccagcctgagcaaaatagcaagaccccctgtctacaaaaaaatataaaaatcagccaggcatggtggcatgtgcctgtagtctcagctagaggcgagaggattgcttgagcccagaaggttgaggctgctgtgagccaagatcatgctactgcactcctgcctgggcaaaagagcaagactctgtctcaaaacacaaaacaaaaagcacataaaacaatgctatacagtgtaataattttggaacaacaatatgtagaaaaaggagaaaataacccaatgtatatcatttatgggagaggagagtcttcccagcaaggctgagctgacctttgaagcaagaacagatgaggcagaaggaaataaggacttttgaagtcattagttctgcccatcaaatatttccagctggcagcaggatgcggtggtgtgtgcctgtaattccaggtacttgggaggctgaggcaaggggatcacttgagcctgtgagttcgagaccagcctcagtaacatagcaagaccccattaaaaaaaaaaaaaaaggaaaaaagaaatcagaagtagaaagtcaggtgcagtggctcactcctgcaatccctgcactttgggaggccaaagcgggtagatcacctaaggtcaggagtttgagaccagcctggccaacacggtgagaccccgtctctactaaaatacaaaacttagccaggtgtggtggcaggcgcctgtaatcccagctacttgggaggctgaggcaggagaatcgcttgaacccaggaggcagaggttgcagtgagcctagatcatgccattgcactccagcccgggtgacaagagcgagactccatctcaaaaaaaaaaaaaaaaatttcttcctgaattaaacgtgggctgtcacctttattcccatagccaggcaatgatttcctgacatggcccgtaactgtcctcacgtggcagccccacacagaagctagttaaaatgaaaccatggccctgcgaggaagtgccatcctccctcacattccacaagcatttgctgagcaccagctttttgccaggctttgggttaggcactggggacacaacagtgaaagagaggggtaaaatgtctgctatccaggaactgatgttctatagcataaaacaggcagtaaggaaggatgtaaataagtagaacctacaagggtggtaagtgctatggaggcagaaagcaaactaagccagggaggtggtaggaagagggggagggagttgtaagtttcaggcagggcacccagggaaggcctctctgagaagctgacgtttgagctgagatctggcggggataaaggattaagccagactgaggtaggagaccagcaggacttgttttctggtcacaatcttgctgaccaaaacaggatctggtccagacgggatgaagtaaagaaactggcaggaaccagccgacccctaggcagcaatccctagctgctctcattgtctattagcataagacactcccaccagagcatgacagtttacaaatgccatggcaacgacctggaagttaccgccccttttctaccaggaagttatctcccatttcacacagttctaaatgacccaccctctcaatttgcattaacccaccccctaatttgcatgtaactgaaagtgggtagaagtgagtgtaaatagttgccaacagctcatatgttgtctactctgggtgcactgcctatgagccggttctgttctgcaaggagcagcactgttctatgaaagattgttgtcaaacaccacgggctcatccttgaattccttcctgggtgaagacaagaaccctcccaggctaagccccaattttgatgctttcctgtccagcatcaagatcactatctggggaaggagtgctcttagaatagagaacagcaagtgcaaagcccatgaggcaggagcaagggacaagaaggccatggggctagagccaaggggagattggtaggaaatgcactttgagaggtgatgggggcagactgtgggggctttgtggtctgtggtaggaacttacttttcctctgagtgagatgcagccatgggagggtttgaagtagggatgttatctgattcaggcattgtgatattgtgatttacaataagatatatgtacaattggctgggcgtggtggctcggtgggaggccgaggcagaaggatcgcttgaggtcaggagttcaagaccagcctggccaacatcgtaaaactccgtctctactaaaaatacaaaaattagctggacatggtggtgtgcacctgtagtcccagctactcgagaggctgaggcaggcgaattgcttgaacctgggaggtggaggtttcagtgagctgagatcatgcctctgcactccagcctgggtgacagagctagactccatctcaagaaaaaaaaaaaaaaaaagaaacatccttatcatatcttgctggacaaaagtccaaggaacaccatgatgatatcctactggaacaagggccagaactgccttatcatgggagcgtcttatcaatatcctgctgggcagcaagccatactgcccagacccctcccacccatacctataaattgccccagcctgtaagcagtgatgggctctggcattaggctggtcccccacttctgtaagttttatgctggacataaagcctgtatttgatgtccagcccccccttctttctgtgtatctttctttaaccctcaccatcgcttcaaaacctaacaaagacgggttctcactattttgccgaggctggtcttgaactcctgagctcagccgatcctcctgccttggcctcccaaagtgctaggattacagcagtgagccacagcacctggcctgaaatttttttaattaattaattattttgtagagccacgatcttgctatgttgcccaggctggtctcaaactcctgacctcaagtgagccgcccgtcttggccttcctaagtgctgggattacaggcatgagccaccacacccagtgagtgtcagaactgaactgaatgagaaaacacccaagtggtgtctgctgtcaaattgcttggtgtgggacagaaaacccccctatacacccagagtccctgaagtattctgtgttgtgagaatacagcaggagaaactggatttgtttttcttgtgtggggggacaggaggaagtaaggaacagagaaagaaggatgctgctcagagacaggtgagacaggagggtggaccagcccaggaccggggcataggagccaggagaagtggctaattctggatagatttgagggtgcccacaggatttgctgaagaattgggcatgggatgctgggccacacagaacacgttcaggatatcaggcgatgttttttgtgaagtccttgtctatagaaacagtttgattgaaagatgtggccaggtgtggtgactcacgcctgtaatcccagcactttgggaggatgaggtgggaggatcctttcaggtcaggagcttgagaccagcctgggcaacatgtagagagcccatctctatttttttaaaaaagggaaaaagcaatttaatttcttttttcttttttgactagagacagggtttagccatgttgcccaggctagtctggaacttctgggctccagggatctgcccaccttggcttcccaaagtgctgggattaccagcaccctaaaaaaaggaaaattttaaaaaaagaaaaatttgttacaaaattcatggacctaagtgaggtatagtgatttatcagtgatagagaataatgcacagagaagaggtacttaggtatttgctttttgttgaacccaccaccgtgaaatccaccaaagcgtccaggtaccatctcctcatgtcccttttttgtcatcctgtgtcattttgggctaatttaatatccctcagcatgcaaaagaggcagcattgctgttacactcaacatccttgcttctgctgatctttttttttttttgagacagagtcttgctctgtcgcccggctggagtgcagtggtgtgatcttggctcactgcaacctccgcctcctgggttcaagtgattctcctgcctcagcctcccaagtagctgggactataggcatgcgccaccatgcccgctaattttggtatttttagtagagacggggtttcaccatgttgaccaggatggtctcgaactcctgacctcaggtgatctgtccacctcagcctcccaaagtgctgggattacaggtatgagccaccgcgcctggccacctctgctgatctctatggctatctgtttaacactggtcacatcgttcctcatgacactgccccaggaggctgcttcatctgttgtgacatccatgaataccggcttctggtgacttcgtcagaggttttcttgggctgagtggatgacaaacacaaatgccaatgccaatctttattcttcttgtcagacagtaatgtgctgatgtcataagaaggcttaaaagggaggcgcattgtattactccgttttcacgctgctgataaagacacacctgagactgggtaatttataaagaaaaagaggtttaatggactgacagttccaagtgtctggggaggcctcacaatcatggtggaaggcaaagagcacgtcttatatggcagcagagaagagagagaataagaaccaagtgaaaggggagaaacccttacaaaaccatcagatccgccgggcacggtggctcacgcctgtaatcccagcactttgggaggccgaggcgggcggatcacgaggtcagaagatcgagatcatcctggcaaacacagtgaaaccccgtctctactaaaaatacaaaaaaattagctgggcgtggtggtaggcgcctgtagtcccagctgctagggaggctgaggcaggagaatggcgtgaacccgggaggcagagcttgcagtgagctgagatcgcgccactgcactccagcctgggtgaaagagcgagactccatctcaaaaaaaaaaaaaaaacccatcagatctcgtgaaacttatgcactaccaagagaacagtatgggagaaaccgcctcgatgattccatcatctcccactgggtccctcccacaacacatgggaatcatgggagctacaattcaagatgagatttgggtggggacacagccaaaccatttcacgcatctcacttaagagcatgaaaacccaatcatcaagtttacgaactacaaaaggatcaaatgcaagtcttttatttatttatttatttatttatttatttttgagatggagttttactctgtcacccagactggagtgcagtggcacgatcttggctcactgcaacctctgcctcccgggttcaaacaattcttctgcctcagtgtcttttaaaaatttttcaaatattttttagcagtggtgaggtcttgttctgttgcccaggccggcctcgaacttctggtctcaagcaatcctccagcctctgcctcccaaagtactgggattacagacgtgagccactgcacccagccaaaagcaagtttttgtttgtttgtttgtttgtctgtttgttttctgagacagagtctcgctctgtcaccaggctggagtgcagtggtgtgatctcggctcactgcaacctctgcctcccaggttcaagtgattctcctgcctcagcctcccatgtagctgggattacaggcgtgcaccaccacgcccggctaattttgtattcttagtagagatggggtttcaccatgttggccagattggtctcaaactcttgacctcatggtctacctgcctcggcctctcaaagtgctgggattacaggtgtgagccaccgcgcctggccccaaaaagttttaaccagagtaatgtgagcaagaacttttctggtcatgttaaatgatcatatttggaatttcctggtggaaatgtagaaccacacaccttccacccaagtctgtctttaggccaccatccccgcattcaaaaagccttttttttcttttttttttagacagggtttcactctgtcacccaggcggagcgatcgcagttcacctaagccttggcctcccaggtttaagcaattctttcacctcagcctcccgagtagctgagactgcaggtgcatgccaccacgcctggctaatttttctgtatttttagtagacatggcgtttccctgtgttggccaggctggtctcaaactcctgacctgaagtgatccacctgcctcggcctcccaaagtgctgggattacaggcatgagccaccacacccagccaagatttttaaaactttttacaattttatttttagagctgaggtctcactatgtcacgcaggctgatctcaaactcctgggctcaagcgatcctcttgcctcagcctcccaaagtgctgggattacaggcgtgagccatcgtgcctggcccctagagtccttcaacactgaccttgtcttagccttcaatatccctgcaacctgtgagaataagcaaagcaaatacagtgaccacgtgtctgtccctcctggagcccagctgtagctgaccggagagcatcgggtgcccatcatgttgtggagtcacggtctcgaaaaccctgggaggggagaggcacaatttgcccattatggagaagaaactggccagttcttcaagagcttgatgtctcttttcctggcagcaggagttacaggccatgaatactagtttctgtgggagaaataaaggaatctttgcagatggcaagggaaaaaaacagctcctttctaaaaggacattgcctgccagggacggtggctcacgcctgtaatcccagtactttgggaggccaaggcaagcagatcgcttgagctcaggagttcaagatcagcctgggcaacatggtaaaatcctatctttacagaaaaatacaaaaattagctgggcatggtggcacacatctgtgatcccagctactgggggaggctgaggcaggaggactgcttgagcccgggaggcagaggttgcagtgggtggagatcaggctgctgcactccagcctgggcaacaaagtgagactctgtctcaaaagaaataacaataataaataaaataaaataaaataaaggggcattgccttattgtaaatccaagtttactaagtaactagcctcagtctaaacactggggaaagtacaattctgagatgataggccgtttagatatgaagtaccagatgacatcctacgtgtatataatctgtattttggctgggcatgctggctcatgcctgtaatcccagcactttgggaggtcgaggcaggtggatcgctggaagccaggagtttgagatcagcctggccaatgtggcaaaaacctgtctctactgaaaacacaaaaattagctgggcatggtggcaagcacctgtaatcccaactacttgggaggctgaggcaggagaatcgcttaaaccctggaggaagaggttgcagtgagccgagatcgcgccactgcactccagcctgggtgacagagcgagactctgtctcaaaaaaaagaaaaaagaaagttgatacatggacccatctacctggctccacgctaagaggtggtcatggaccattgatgacccagtgtcctgaatgtgtcctgtgcccagggtacgtccagaagcttcgtggcagcaccattctggtggccgccagggggcgccatgtgcttgccaggcagcagtcctggaactggggtccagccacagggccccaggaccacgccacagggcaagagtcctagagttcctggtagtttccagctgaacctatgcacacggggtcgttggtggaggtggaactagatctctgcagagcaccctaaaggggagaaacgggacaggcccacacaggtcttggtctgaactgggagtaccctgccctgagagcactgtggcttggctggccccagctgctggagagggacttagaggaaagtgccacacagtgtaggatgcccacttgcctggtccaaggatgctcctggtgggtgtgagagaaacagcaaagtccagcatttccagacttggatttctccaaggtttccagtcatgttgccatttattgggaaggggaatggtgcaggactgggggaaggaataggaaaatcagggcttcattttggggaaactgaggctcagaaaagcccacaggcaccgagcaaggatgtgaaaccatttccctcgtaacccccgggcgacaccgcctgccccagttccacgtgaggttgtaaagcactgatgctgctgaacattttcataaatgacttcatttagtctcatcaacaatgagcattttgatcccatttagggggaacaaagggaggctcagaaagaccttgccgaggccttagatggaggaggtggcagattttagtgtgctctgagtccaggcccactttaggctcacagaaccacctcaacccctttctgccctaggccgggcttttccgagcctccctctgcccacttgcctcctccttccaggagtcagggtactggggggcttcccgcctgcgcccaaggggccatagggcctcattcccatccattcctgcctctgtgccttgctctaacccagctggccacagccccacctggcccaggtgccgccggccctgcttggtccccatacaaaggcctgtgggagaggctgggaaattgccatccacctggggacagtgggaaacagtcatcgtcagcctgtccatatccaggacaccgtgctgcatcctggctcacaatcaggaaccagaaggcagcacggcccccacagggctggcacgggcagcctcactgtggcctgtgccctgggcagtaccaggcagctccatcctgtggtacccaggctgagtccatctcttacgcccacgcccaacctctcagcaaacccaggcagctccaggtgcacaaaatctgcacagcacctgccctttctcgcccgaccatggccaccaccctggccccatccacccctgtctccatctggaccatcactcccatccacagactccctgctccttcccaccccaccctcgcaatctgttccacagccacagggagactgtgaacacctgtgtcactcctccgcccagaaccctcccggggtgccatcctgccctgagtaaagggcaaagtcctcccctacggcccaccaggcctcacatgatctgccccgccccactctgactctgtggcctcccacagcctccttgctcacccagcctggccactgcttattattctgttcccaccacggggactttgcttggctgcccctccccataggtcactccctaccctccttccaatgtttgctcaaatcttgccttcccagccaggcttcccctgaccactgcctttaatactttaaccaccctgcctttttttgaactcctaattttttatttttatttttattttttgagataggatctagctctgttgcccaggctggagtgcagtggcgtgatcatagctcactgcaactttgaactgctaggctcaagggattcctcctgattcaacctcccaagtagctgggactataggtgcacacccagcacttataattgtaatttttaatagagatggggtttcactatgttgcccagtctggtctcaaactcctggcctcaagtgatcatcccaccgcagtctcccaaagtgctgggattgcaggtgtgagccaccacacctggccaccacactgccctttttaccccctttgcctactctgattttcttggaaaccttccatagacttcacagcttcctctcaccatcccactcatccagccactggccatggccaccttccctgttactgtacgcaggctccaggagggctggtcagctcagcctctctgctggagtcctttattagtttcccattgctgctgtaacgaattaccacaaacttggtgccttcaaacacatttattctcttgctgctctggaggccagagtctaaaatcagtttcactgggctggagtcaaaggagcggaaggactgcctgccttctggaggctcgggggagccattcattgcctctcctggcttctggaggctgccagcattccttggcttgtggctgcatcactccaatctctgcctctggagtgattttgccttctcctcttctgtgtgcaacctccctctgcctctaatttataaggacacttgtgacagcatatatggcttaccaggtagtccaggataatctcatctcaaaaccattaacttggccaggcgcggtggctcatgcctgtaatcccagcactttggtgggccgagacagatggatcacctgaggttaggagttcgagaccagcctggccaacatgacgaatccctgtttctactaaaaataccaaaattagccaggtgtggtggtgcgtgcctgtaatcccagctacttgggaggctgaggcaggagaattgctggaacctgggaggtggaggttgctgtgagctgagattgtgccattgcactccatcctgggcgacagagcgagactccatctccaaaaaaaaaaaaaaaaatcattaatttacatctgcaaagacgcttcttttgtataacataacatttataggttccagggattgggttgctgtcttagtctattcaggctgctagaacaaaataccataaactgggaggtttaaaaaatttatttctcacagtagtaaagcctgggacattcaagatcaaggtgctggcagattcgctgtctgataagggccctgcttcctcatagaggaggtcttctccctgtgttcttacagagtggaagaggcaagggctctctctatggcctgttttataagggcactaatcctattcatgtgtactttgccctcttgacccaatcacctcccgcaggtcccacctcctaataccatcaccttgggggttgggatttccatatatgaattttgggggttttttctagagacagggtctctctctgttgcccaggctggagtcacagatcactgcaacctcaacctcccaggctcaagtaatcttcccaccacagcctcccaagtgtctgggacttcaggtgcatcccaccatgcctggctaatttttttgtagagatagggatcttactatgttagccaggctgaccttgaattcctgggctcaggcgatcctcctgccttgccctcccaaggtgctgggattacaggcgtgagccactgctcttggcctcagtatgtgaatttcagaggggatacaaacattgagaccatcgcatacctgaatatatttgggggtcgttattcagcctactgataatcaggtcctgactgatggtggttctaggagaacagagcctcagggaagctcatctgcagctggttctctaatctacagggcttaagagcatcatcaaccctgttgccatggttaagggggcactggtagttcacaacatgcagagacaaaatggtgacttatactgtgacctgtcgtcacctgtcatttacagggtcaggtccattctgcactggtctccctgttgagcaaggacggtggccattgtcagtccaggctccccacttccttgttctttttttttttgatagagtctctctctgtcacccaggctggagtgcagtggcacgatctctgctcactgtaacctccgcctcctgggttcaagtgattctcctacctcagcctcctgagtagttgggattacaggcgcccgccaccacgcccagctaatttttgtatttttagtagagatggggtttcaccatgctttccaggctggtctggaactcctgacctcaggtgatccgcccacctcggcctcccaaagtgctgggataataggcgtgagccactgtgcctggctgcttgttcttatcccttttttttttttttttttgagacaaggtctcgctctgtcactcagagtggagtacagtggcgcgatcatggctcactgcagcttcgaccgcctgggcccaagcaatccttctccctcagcctcctgagtagctgggaccacaggtgcacgccaccacccccgggtaggtttttccaattttttttttttttttaagatggagtctaactctgttgcccaggctggagtgcagtggcacaatcttggctcactgcaacctctgcccccaccaggttcaagtgattctcctgccttagcctcccgagtagctgggattacatgcacatgccaccacgtccagctaattttttgtatttttagtagagacaaggtttcaccacattggccaggttggtcttgaactcctgacctcaggtgatcttcccgcctcggcttcccaaagtgctgagattacaggcgtgagccaccgcacccggccgacttttacaaaattattattattattttgtagagatggggtctttctattttgcccaggctggtcttgaactcctggcctcaagccatcctcccacctcagcctcccagagtgctgggattacaggcatgagccaccacacccagccaacaaggggagccttaagtacagagcaaagtctcctggtagctcaccagccaggtggtggactggtattggggagtccaccccagtggggactcactgaagcagaccagtatgtgggaaaaccatggacatgacccccagatctaagagcagtggacactggggaagaccctctactcccactcaaccctttctccggtaaggacccaagagggcagaggcctaacccagcccccggcgttcatcctgattcatccaatgagtctaatcttctgtggtgtgacttgttcaggaatgggcatccaacctagttctggccaatggggtgcaaggggaggaggatgttctgaaaaagtgtagaaaaaagaggatcacagatctaaggtttgtagtaagagtctgtggtttccagaatgacatggaagaaggaatgagggaggacacctacaagttagatgatggctacaccccaagacttcagaggtgtggactgaaagccacaaaagaaggaagtaaatggtcagataatgcatttcctttaggaatgtaagtcatgaggccagctgaccacggtgaaatcttacattgggaaatagtgtgggctgttgacttgacaatggagccataggttagccgccattttgcagagctatctgtgaaggtgctgatgacactcttgaaaggatcccagtactggtcgaaggtgaagacacaggaatccatcatgtggtgagattctaacttcatccctaactggcggtctacattacgtgtagatctgtttactaaggcagttgatctcttctttggcgtgtctttgaaaggggttttctcattccttatgttaccaaataaaggaggtgtttttattgcactctccaggaaggacaagtggaggaagaacagctgcagtttgtctctgtccctcatgccttccctgggggtgacggtgggggaggacccatggtttagtggaacttattcttgtgcctataaaccagctagagaggagccgccattatttatgtatttatttagagatggagtcttgctctgtcacccaggctggagtgcagtggcgagatcttggctcactgcaacctctgccttctgggcttaagcgattctccttcttcagcctccctcccaagtagctgggattacaggcgtgcgccaacatgacttgctaattttttttttttttgtatttttatttttatttttttttgttttttattattatttttttttaatttatttttttattgataattcttgggtgtttctcacagagggggatttggcagggtcatgggacaatagtggagggaaggtcagcagataaacaagtgaacaaaggtctctggttttcctaggcagaggaccctgcggccttccgcagtgtttgtgtccctgattacttgagattagggattggtgatgactcttaacgagcatgctgccttcaagcatctgtttaacaaagcacatcttgcaccgcccttaatccatttaaccctgagtggacacagcacatgtttttgtatttttagtagagacgtggtttcaccatgttggccaggctggtcttgaactcctggcctcaggtgatcggcccatcgtggcctcccaaagtgttgggattacaggcatgagccactgcacctggccaaggagcctccattttagatggtaagttcaatttgggggtgttgggaagcccgctgcggccacccagctaagcctttaccaacaggctgatatatatttttttaatttttaatttttgtaggtgtacttatttatggggtaaatgaaatgttttgatacaagcatggaatgtataataatcacatcctggagaatggggcatccatcccctcaagcatttatcctttgtgttacaaacaatccaattatactctttcagttatctttaaataggcgagttattattgactataggcgccctgttgtgtgatcaaatagtaggtcttattcattatttctatttttttatacccactaaccatcctctcctccccccaacctccactatccttcccagcctctctatgtccatgagttcaattgttttgatttttaactcccacaaataagtgagaacatgtgatgtttgtctttctgaacctggtttatttcacttaacataatggtctccagttccattcatgttgttacaaatgactagatctcattcttttttatggctaaatagtactccactgtgcatatgtacattttccttatccattcatctgctgatggacacttaggttgcttccaaattttggctactgtgagcagtgctgcaatacacatgtcagtgtagatatttccttaacagatacactgatttccattctatggggtatatacccagcagtgggattgctggatcatatggtagctcaaatttttaggtgttttgtttttttttttttttttgagacagagtctagctctgtccctcaggctcaagtgcagtggtgtgatcttgctcactgcaacctctgcctcccaggttcaactgattcttctgcctcagcctcctgagtagctgggatgacaggcatgcaccatgacgcctggctaatttttgtatttttagtagagacggggtttcaccacattggccaggctggtcttgaactcctgacctcaagggatccacctgctttggcctcccaaagtgttgggattacaggtgtgcgccactgcgcccagcctcaatttttagttttttgaggaacctccaaactgttctccacggtggttgtactaatttacattcccaccaacaatgtacgagggttcccttttcttcacatcattgccagcatttgttattgcctgtcttttggatataaggcactttaattggggtgagatgatatatctcactgtagttttgatttgcatctctctaatgatcagcgatgttgagccccttttcatatgccaataggcggatatttctagctgtctgtgtgattcctgggtctacttctccaaaatcagactggaagcagagaggcagtgtggagagcagataagagtcagggctctgctgccagactgcccgagttcaaatcctggctccacctctggctcactggggggactttgagcatgccactcagtctttctgacctcagtttccccctgtataaaatggggatgataatgctacctatctcatagggttgtggagaggaccaaatgagctagtatggggtatttcatggatccacggaattgggatgggtgttaaaatagatgatctgttgtggtttaatcaacagtggtcttttttgcttccttttttttttttttttttgagatggagtctcactcttgttgcccaggctgcagtacagtggcgcaatcttggctcactgcagcctctgcctcctgggttcaagcaattttcctgcctcagcctcctgagtagctgggattacaggcatgtgccaccacgcccggctaattttgtatttttagtaaagatggggtttctccatgttggtcaggctggtctcgaactcctgacctcaggtgatccacctgcctccgcctctcaaagtgttgggattacaggcgtgagccactgcgcctggccttttttatttttatttttattttttttttagatagagtcttcctctgtcgcccaggctagagtgcagtggcacgatctcggctcactgcaacctccgccttccgggttcaagtaatcctcccgcctcagtctcctgagtagctgagattacaggtgtctgccaccatgcccagctaatttttgtctttttagtagagacagggtttcaccatgttggtcagggtggtctcaaactcctggcctcaggtgatccacctgcctcggcctcccaaagtgttgggattgcaggtgtgagccactgcacctggctgctttatttttttctttctaagatggctcttatgcacagagcaccttagagttggtgtaatagggcacatgggaaggctaagagcagtgcttgtagcacagaaagtagcatgtgactgttgatcagtatcattactgttaattcccctcaaacaccccacagctccctccgctctcttgagggagtcccgcagaaagacagcttctctctctctctcattctgtctttctctctcccttgcctctgctgaactcaaacaagaaagcgtgttgcagtggtgttggcagcctttcacttacaaccttatcttcaggatgaagataaaactagatagagattgcagagcagagaaacgggaacccaggatgccaatgacatcagtgagcatctggacagactacacatcttctgtgggtttcctgttacttgcagcccaaagcattcatatgtggagtgtgtgtgtgtgtgtgtgtgtgtgtgtgtgtgtgtgtgtgtgaaatgttctcctgaaagcactggggggtttctgagacttctgaacatgggctatctttactagtgttttttcaggcctgtctcccactcctgagccccctaagccagtattctctccaacaaggcctctttccctaccccatgctacagatctctgggaagctgagcccagtggtctgattgacaggtgactccaagatgttgcttgttcaaagatgctgagatctctctggaaattgtcactaatttccacttaggacagcatttcccaaagagtggaatatgctagtgagatttgacacatttaggtggtacacaaaacatttgttatgtgaatagctctgtgttttctttttttcttttttagagatagggtctcacactgtcacccaagcttgagtgcagtggtgcaatcttggctcactgtagcctcggcctcctgggctcaagtgatcctcccacctcagcctcccaagtagcttggactacaggcacacgccacagtgcccagctaattaaaaaacattttttttttttgtagtgatggggtcttgctatgttacccaggctggtcttgaactcctggcttccatcaatcctcctgccttggccttccaacatgctggaattacaggcatgagccactacacccagcccagctctgggtgtacaggcgcctgggtgttttttttttttttttttttttttgagacagagtttcactcttgttgcccaggctggagagcaatagctcgatctcagctcactgcaacctctgcctctgggttcaagagattctcctgcctcagcctcctgaatagctgggattacaggcgcccgccaccatgccggctaattttttgtatttttagtagagatgggctttcaccatgttggccaggctggtctcgaactccagacctcaggtgatccactcgcctcaacctcccaaagtgctgggattacagtcgtgagccaccacgcccagccctgtattttctttgaaaaagtattaaatgattttggttttctctttatagtagtgatacaatgttgccttcaaaatgaattaagcctaaacattatttaaagaaattaagtaaataagagtttaagtagtccttgaataggacaaaaaaatctcaagtggtatgtgagccactgaagtttgggtagcttggttttagagaaaccctgcactattttttttccccctggcgacggtccccagtttgtctggcctgggggtgagactcgctcttctttcttgggtttgcttttcaaatgcacagagcagggcactcagccgacaacatgagggctgacggttgtcaccaagcagcgatgtctctccactgggagcctttaaaaaggctacacttggcccggcgtggtggctcacgcctgtaatcccagcactttgggaggctgaagggggcagatcacctgaggtcaggagttcgagaccagcctgaccaacatggagaaaccccgtcactaaaaatacaaaattagccgggcatggaggcgcatgcctgtaatcccagctactcgggaggctgaggcaggagaatcgcttgaacctgggaggcggaggttgcagtgagcccagatcgcgccattgcactctagcctgggaagagcaaaactccgtctaaaaaaattttaaaaaggctacacttgcagtgatttaaaataaactgaggcttttaggaaatctctgctgaagcggctcctgcttcagcagaaacacctgtgtgttttaatgctgaggatgggcggagtatggagccttgggcagagtacggagccttcggtgaaactgcggactgggagagacctggaccagttacaagctgtgtaatatcagacaagctacctgtatttgtctgttctcgtattgctataaagaaatacctgagaggcccagcgtggtggctcacgcttgtaatcccagcacttttgaggccgaggtgggcagatcatttgaggacatgagtttgagaccagcctgaccaacatagtgaaaccccgtctctactaaaaatacaaaaaaaaaaaaaaaaaaaattagccaggcatggtagcgggcgcctgcactcccagctacttggaaggctgaggcaggagaatcacttgaacccaggaggtggaggttgcagtgagccgagatcgcaccactgcactccagcctgggtggcagagtgactctgtttcaaaaaaaaaaaggaagaaatgtgcccaggccaggcgtggtggctcacatgtgtaatcccagcattttgggaggctgaggcaggagaatctcttgatccagggagattgaggttgcagtgagctgagatcgagccactgtactccagcctgggcaacagagtgagactctgtcaaaaaaaaagaaaagaaaagaaagaaagaataaataaataaataaatatgccctggggcggacgcagtgactcatgactgtaatcccagcactttgggaggccacggtgggaggatcacttgagcccaggagtttgagattacagtgagccatgatcatgccactgcactccagcctgggtgacagggcgagaccctgtctcaaaacaaaaaaacaaaattacctaagcccaacatggaactccattatactcataaccaggtttgttgtcgtcgttgttagagacagggtctcgctccatcacccaggctggagtgcagtggtgtgatcatggctcactgtaatctcaaactcctgggctcaagcgatcctcccaactcagcctcccaaactgttgtgattacaggcatgagccaccgcaccgggcccgtaaacagttttaaatttttcaggaatgcaactactgggtagaaccaggaatgtgtgttcattgttcaccatttggtgccagagtcacaaagctgtgtctgtctttatttgtggctctccagctggcattcacaaagcttctgcccctggcacacccctaaccctttattatgttttatagcttagttaagtctgagctttttgaacattttactataaattactttccgcttattctttcttcattataataaggacattatcttgattaaaaattttattttgtatgtgggtgggttatattatccataaactttatttcagggtggtaaagggagcatataaaatatttattataacactaatctatgctaaaaatcaaaacagccgttacccctgggggtggggggcgggcggtaagaggattgactgcaaaagggcacaaaggaatgttctggagagaaatgttctctgccttgattgaggtggtgtacaattgtcaaaactcatccaactgcacacttaaagtgggcgcgttttaccgtaattataatgtaaattatacctcactcgagtggaataaaacaaattttaaaatatctgcatagaaactttaaaagtatagatttggccaagcatggtggctcaggcctgtaatcccagcactttgggagggcaaggtgggtggatcacctgaggtcaggagttcaagaccagaccagcctggccaacatggagaaaccccacctgtactaaaaatacaaaattagccaggcgtggtggcgggtgcctgtaatcccagctgtctgggaagctaagacacaagaagcgcttgaactcgggaagcagaggttgcagtgagccaagatcttgccactgcactccagcctgggcaacagagcaagaccctgtctcaaaattaacaaaaaacatagacttgttctagaaagcagatagagatctgctaaggccttgaaatcaattaagtggatttagaccagcatttaaaaacaaaagcaaaaacagaagagattagaggctggcactgcccacattgtgagtcttgcacaagttatataaaacttttttttttttgagacagagtctcactctgtcacccaggctggagtgcagtggcatgatctcagctcactgcaacctccgcctcctgggttcaagcaattctcccacctcaccctcccgagtagctgggattacagatgcgtgccaccatgcccggctaaatttttttgtacttttagtagagacggggtttcaccatgttggccaggcaggtcttgaacccctgacctcaagtgatccacctgccttggcctcccaaagtcctgggattacaggcgtgagccaccgcaactggccaagttttgtaaactttaattatgtaatagatatacatatatgcatgtgtgctaggttgtgatataagtacatgtcttattttgaactgtagtcaaaaacattgaaaaaactaaaatggtacttgccagactttcaaacatagatctcttacctcttttgcagcaatgtctgagatatgattagatcatcatgattttatccgagaagactgacagtcagaagcttgtgtttgaaagaggattaaacgtggtagagtgagttctaataacagaaatcacagggatggggaataaaaagagtgttggggtgagagctgaatgctcatcgttcataatgatgtctatatttgatcaatccagaattaacatgacaaacctggaaaaatacttccaaattgcatcacatgcaaagggctaattttaatagatttcccacaaatgaataagaaaaggaacaatctcatcaggggaaaaaatacacagagaatgtgaacaaatagttcatagaaaaggaaataagaatggctcttaagtccgggcgccgtggctcacgcctgtaactccagcactttgggaggctgaggtgagtggatcacttgaggtcaggagttcgagaccagcctggccaacataatgaaaccctgtctccactaaaaatacaaaaattagtcgggcgtggtggtgggggtctgtaatcccagctactcgggaggctgagacaggagaatcgcttgaactcaggaggcagaggttgcagtgagccgagatcgcaccactgcattccagcctgggcaacagagcgagaccgtctttttttttttttttttttctgagacggagtctcgctctgtcacccaagctggagtgcagtggtgcgatctcagctcactgcaagctccacctcccgggttcacgccattctcctgcctcagcctcccgagtagctgggactacaggcgcctgccaccgcgcctggctaattttttgtatttttagtagagacggggtttcaccatgttagccaggatggtctcgatctcctgacctcgtgattcacccgcctcggcctcccaaagtgctgggattacaggtgtgagccaccatgcccggctgccacacacttttaaatgaccagatctcttgagaactcactcactaccaaggggatggtgctcacccattcatgaaggatccaccccatgatccaatcacctcccaccaggctccacctccaatgttggaaattgcaattcaacatgagattggtggtgatagcacctagactatatcggccacggtacctagagcataacgtgcagtgatgaaaaacaaatccaacagcttgtcaaggtcatcagtgacttccatggtgccaaatccaaagttcaattcttttttttttttttttttgagatgaagtccctctctgtcaccctctctgtccaggctggagtgcagtggtacaatctcagctcactgcaaccttggcctcctgggttcaagcgattctgctgcctcagtctcctctgtagctgggactacaggcatgtgccaccacacctggctaatttttgtatttttagtagagatggggtttcaccgtgttggccaggctggtctcaaactcctgacctcaagtgatccgcccacctcagcctctcaaactgctgggattacaggcatgagccaccgcacccagcctcaattcttattttcttttctttctttttttttttttgagacagtcttactcttgtcacccaggctggagtgcagtggccaatctcggctcactgcaacttccacctcctgggttaaaaagattctcctgcctcagcctcccaggtagctgggattacaggcacccgccaccactcccggctgagggcctcgtattataagaatatttgtgattgcatttggagcctacatggattatccaggatcatcttcccattttaatattcttttttttttgagatggagtttcgctcttgttgcccaggctagagtgcaatgacacgatctcagctcactgcaacctctgcctccagggttcaagtgattctcctgcctcagcctcctgagtagctggcatgtccgcaatttattccttctgatgggttcttggtcttgctgacttcaagaatgaagccatggaccttccttcggggtgagtgttacagctctttaagacggtgtgtctgaagtttgttccttcagatgttcacatgtgtctggagttccttccggtgggctcatggtctcactgacttcaggagtaaaaccgcaggccttcacagtgagtgttacagctcttaaaggtagtgtggacccaaagaatgagcagcagcaagatttattgtgaagagccagagaacaaagcctccactgtgtggaaaaggaccagagcaggttgccactgctggctccagtggccagcttttattcccttatttggccccgcccacatcctgctgatttgtccattttacagagtgctgattggtccattttgcagagtgctgattggtccattttatagagtgctgattggtgcgtttacaatcctttagctagacacagagtgctgattggtgtgtttttacagagtgctgattggtgcatttacaatcctttaactagacacagagcgctgattggtgcgtttacaatcgtttagctagacagaaaagtactccaagtccccactcgacccaggaagtccagctggcttcacctctcactgggattacaggcatgtgccaccacacccagctaattttgtatttttagtagagatggagtttctccatgttggtcaggctggtctcaaactcccgacctcaggtgatccacccacctcagcctcccaaagtactgggattacagacatgagccaccacccccagcctctgtttcttttttttgggcaccagtaatcccagctacttgggaggctgaggcaggagaatcacttgaacccaggaggcagaggttacagtgagccaagatggcaccactgcactccagcctgggcaacagagcgagactctgtctcaaaaaaaaaaaaaaaaaaaaagagagaaaaaaacctgagggtgctgttatagaaggtgcaaatgtgcaaatggccactgtgaacagccagtggaccctgctgcacctttcctcccctcccatcaacctcttttgtgcctccccctccgtgtaccaccttctctgtcaccaaccctggcctcacaactctctcctttgccactatcatcaacaaacaaacaaacaacaacaacaaaaacctcagacttctcaagaacaatactgcaaacaagatgagagaaaaatgcctttaaaattctgaaacaaatggagtttggtccctgaattctgtggccagtcaactatcaatcaagtcagaggagagtttgaagacattttcagacgtgtaaagtctgaaacgtttacctcccatgaccttgctcaagaagctccaggatggccaggcacggtggctcacgcctgtaatcccagcactttgggaggctgaggcgcgtggatcacgaggtcagaagttcgagaccagcctgaccgacatggtgaaaccccatctctcctaaaaatacaaaaattatttgggcatggtggtgtgtgcctgtgataccagctactcgggaggctgaggcaggagaatcgcttaaacctgggaggcggaggttgcagtgagccgagatcgcgccactgcactccagcctgggcgacagagcaagactccatctcacaaaaaaaaaaagaagaaaagcttcaggatgcactcaactgaaatgagagcaccaccaagaaaaaggggagcactgagatccaggacacaggggacctgacataggagagaagtgaagaggcacctcaggatggcagtaaaggaggtcccagcatggcagcagggcaccacagtctgagggcaggccgggtatggtgttgtgtgcctgtgatcccagctactggggaggccgtggcaagaggatcacttcaacccaggagctcgaggctgcagtgagccatgatcatgccactgcactctagcctgggtgacagacagagaccctttctctaatatagacataaaaatattatataaaaataaatatataatatttctattatataaaaattatttctacatatttctataattatataatatacaaattatttatttatttatattatataaaaataaaatagaaaaggttagagggcaacaagtccagataggaccgtgtgactcatgaggccaatgtgggggcaatcatcgccagcatgccaactgccattgtactgttttttttgttttttggttttttttgagacagtgtctcactctgttgcccacgctggagtgcagtggtataatgatctcagctcactgcagccttgacctcctgggctcaaatgatcgtcccacctcagcctcccaagtagctgggatgacaggtgcacaccaccacacctggctagtttttgtatttttttgtagagacggggtttcaccgtgtcacccaggctgatctcgaactcctgagctcaagcaatctgcccaccttgcactgtggcctcccaaagtgctgagattgcagcttgagccactgcacccggcctttgttttgttttttaagttgaggagagtatggctgggtgaacatgaaccacattcttcctttctttttaaccagagacagggtctcactacatcacccaagctgctcttgaactcctgggctcaagagatcctcccacctcagcctcccaaagtgctgggagccaccacacccggctcacattcctgtctatacttgacttgccttgaccatggcagagagcctgttctccctgcgagacctgccatggaccatggcagagagcctgttctccctgagtgacctgccatggacccaggggtatactcgtttccctctagtaactgtgctgctgggcccacgcctgagagcctgtggagggctggggtgttcctggaggtaggatacacagagctgaccacactcctgctgaccatgcacagcgtgacccacgcttcagccctgacagatcccccagttggtggtgagtcatgtgccctctaggactcaactcctgttctcacccactgaactcacgaggaaggattagtgtagaccctcagggaagatcacaccagatttgatcttgatatgacccagctcatccttcacacagcaggggccaggctgccctttcctcacacagaaggatgagccttgctctccagtgggtttttatttatttatttacagacaggatctaccaaggctggagtgcagtggtgagatcttggctcactgcaacctctgcctccctcccaggctcaagtgatcctcccatctcagctttctgaatagctgggaccacgggcacacaccaccacacctggctaatttttgtattttttgtagagacgaggtttagccatgttggccaggctggtctcaaactcctgggctcaagcgatcggcccgcctcggcctcccaaagtgctgggattacaggcgtgagccactgcgtccagcctaataagatattttttaaggcaattttttgggggggacagggtcttgctccgttgcccaggctggagtgcagtggcatgatcacagctcactgcagtctcctgggatcaagtgatcctctcacctcagcctcccgagcacacccccgtaggactttaaaatcttccaacactcctcaatgtgactacagtggaaaatggtgtacccaacaatggtacaataaatagttggggccaggcatggtggctcacacctgtaatcccagcactttgggaggccgaggtgggcagatcatttgaggtcaggagttcaagagcagcctggccaacatggtaaaaccctgtctctactaaaaaaaaaaaaaaaaaaagtccgggtgcagtggctcacgcctgtaatcccagcactttgggaggccgaggcaggtggttcacgaggtcaggagatcgagaccatcctggctaacaaggtgaaaccccgtctctactaaaaaatacaaaaaaaaattagccgggcatggtggcgggcacctgtaggcccagctacttgggaggctgaggcagcagaatggcatgaacccgggaggtggagcttgcagtgagccgtaatcgcgccactgcactccagcctgggcaacagagtgagactccgtctcaaaaaacaaaaaacaaaaattatccaggcatggtgtcatgtgcctgtattcccagctacttggaaggctgaggcaggagaatcacttgaacccaagtagcagaggttgcagtgagccaagatcacaccactgtgctccagcctaggcgacagagcaagactctgtcaaaaaaaaaaaaataataataaaataaaaataaataaatagttgggccaatatttataagagctcatgtttgtttgagggtttagtctgtccctggcctcaattccggattttatggaactgttatgtccacctgatgatacagtgatgcttggaggccacgtgcagtggctcacgcctataatcccagcacgctgggagtccaaggcaggtggatcgcttcagcccaggagtttgagaccagcctggtcagcaaggcgagactgtgtctacaaaaaatttttaaaaatcaggtgggtgaggtggtgtgaaactgtagtctcagctactagggaggttgaagtgggaagatcacttgagtccaggagttcgaggctgcagtgagctatgatcatgacactgcactgcagcctaggcaacagaatgagaccctgtcttaaaaaacaaaatacatggccaggaagggtggctaacgcctgtaatcctagcactttgagaggccaagacaggtggatcacctgaggtcgggacttcgagaccagcctgaccaacatggagaaactccgtcttgactaaaaatgcaaaattagctgggcgtggtggtgcatgcctgtaatcccagctactcaggaggctgaggcaggagaattgcttgaaccccggaggcggagattgcagtgagccaacattgcgccattgcactccagcctgggcaacaagagcaaaacttcatcttaaaaaaaaaaaaaagaaaagaaaaaaagacaaaaacaaaaccatgctgggagatgacacaggacctgaggcctgaaatccaggatgagatggcagagggatgaatcggagacagtggggcctggtggttaaggccaagtgtgcagaaaggaatgaatctcaggttttttgtttgtttgtttgtttgttttttgacacagagtcttgctctgttgcccaggctggagtgcaatggtgcaatctcagcttactgcaacttccacatcccaggttcaagagattctcttgtctcagcttcctgagtagctgggaacacaggcgtccatcactatgcctggctaatttttgtatttttagtagagacagagtttcaccatgttggccaggctggtctcgaactcctgacctcaggcgatccacccgccttggcctcccaaagtgctgggattacaggcatgagccaccgcacctggcttagctattcttcttactgacagtgtgatgtcaggtaagtgagctcactcctctgaacctcagtttcctcttctgtaatacaaaatgggaccatgtgaagtggtgaggaatccatgcaatcatacacggttcacaggaagcctccagtgaactggctgtggctgtgattatgaggtgaagtgtggggtgggctgtcctgggtccgtcacaggaagcctccacatctgagagggtgagtcactcttccttcctgctgtaatttgaagcagggtggcatctctcgggaggtgagctgtgccctgggcatgctgctcacctccggtggctcacaggtcccctgacatgtgacatcatatgcagtcaggatgaaatcatggagctcaaagtttgggatgaaaggaaatggttctgctgggaggcggagattgcagtgagccaagattgcaccattgcactccagcctgggcgacagagtaagactcggaaaaatagaaaagaaaaaggaaagaaaaaaagaaggaaagaaggagggaaggaaggaaggagagagagagagaaacgaaagaaggaaggaaggagagagagaggaaggaaggaaggagaaagaaagaaagagaaagaaagaaagaaaagagagagagagaaagaaagagagagagagaaagaaaatgattctgtgctctcctcctcctctcaatctcaaattctagggtccagcacttagccgggcagcaagaatgggttcatgatcccaacagtcattaggattcatccatgtatttgatcatttaataaatccttactgcacacctgctatgtgccagacagccaacatccctgccttcctggagctgttaggaagctggggctgatagctccaggggagatgctagaaaataaacataataaacaagtaaatattacagtctgttagaaggtgatgaatgctatgaaacaaatattagccagggtaagcttagggcaggggtcagcaaactacagtcgggtggccaaatccagcctgtcatttgtttttatacagcctacaacctaagaatggtttttactttttttttttttttaaagacgaagtctctccctgtcacccaggctggagtgcagtggtgtgatcacttctcactgcaacctctgcctcctgatttcaagtgattctcctgcctcagcctcccgagtagctgggattacaggcaaacacctccatgcccagctaatttttgtattttgagtagagacggggtttcaccatgttggccaggctggtctcaaactcctgaactcaggtgatctgcctgtcttggcctcccaaagtgctgggattataggcatgagccaccatgcttggcctagttttaacttaaaaaaacttttttttgagacaggttctcacctctgtcactcaggctggagtacagtggtgcgatcatggctcaccacagcttcaacatcccgggctcagataatcctcccacctcagcctcccaagtagctgggactacacgcgtgcaccaccacaccctgctaattttagtatttttctaagagatggggtcttgctgtattgccccagctggtctcaaacttctggacttaagtgatccttctgcctcagcttcccagagcactgggattacaggcataagcaaccatgcccggttgatttttatgttttttaatggttggaaaacaaaaacaaaagaaaaataatattttctggtgtatgaaaattatatgaattttggctgggcgtggtggctcatgcctgtaatcccagcactttgggaggctgaggcgggcggatcacctgaggtcaggagtttgaaaccagcttggccaacatggtgaaaccccatctctactaaaaatgcaaaaattagcctgatgtgatggtgggcacctgtaatcccagctactcgggaggctgaggcaggagaatcgcttgaacccgggaggcagaggttgcagtgagctgagatcgcgccattgcactccagcctgggcaacaagaaagaaactccatctcaaaaaaaaaagaaaagaaaagaaaagaaaattatatgaatttccaatttcagtgtctgtaagtttgtttgttttttggagatgaggtctcactatgttggccatgttggtcttgaactcttggcctcaagcaatcctcctgcctcgacctaccaaagtgctaggattacaggcatgagccactgcgcctggcctccataaagttttactggaatacacccacactcattgggtcctgtaatgtctgtaggtgcttttgtttgatgacagagtccagtagctgtgacggaggctacgtggcctgcaaatcttaaaatatttaatatctcgccctttaccaaaaaacttttgcagacccctggcttgtggggtggggagtagtgtgtggaggtggattgtaattttaaattagtcaaggggagggctgcctgagaaagtgtcatctgggtaaggcctgaaggaaggagagaaggggctacatgggcacctggggaagaatgttctaggtcgagggaacaggcaataagaaggccctgagaagtggggacatgactaatatgttcaaagaacagtgtagaggccaggtgcagtggctcacacctgtaatcccagcactttgggaggccggcgtgggcggatcacttgaggtcagcagttcaagaccagccttggcaacatggtgaaaccctgcctctactaaaaatacaaaaattagcccggcatggtggcatgcacctgcagtcccagttgctcgggaggctgaggcagaagaatcgcttgaacccaggaagcagaggttgcagtgagctgagattgcaccactgcactccagcctgaacaacagagcaagactccatctcaaaaaaacaaaacaaaacaaaaaacagcgtagaagcctggtgcctgaaccagtgtgggtgaggggcaagtagtaagagataaggaaagagaagtgacggggaggtcacgtggggtctcgtgggccataaggaggtctctggctttcccctgagtgagaggatcaggagggctttgagcaggtgagagacgtgatctgactcaggtgttcacaggacccctctggttacatgtgagggacagactgcagggggtgaggagggggacaggatgggagcgggaagaccagggagggacctgctgagacagcccaggaaggagaggatgggtaggggctgcagaattgggcaggttctggatagattggaaggtggagctgacagcatttcacactggataatattctaagcagggaagagtcactcctaaacgtattcacacacctgtaatcccagcagtttgggaggccaaggcgggtggatcacctgagatcaggagttcgagaccagcctggccaacatgccgaaaccccatctgtactaaaaatacaaaaaattgaccagccatggtggtgcgcacctgtaatcccagctactccataggctgaggcaggagaatcgcttgaacccgggaggcggaggttgcattgagccgagatcatgccatttcactccagcctgggcaacaagagcgaaactctgtctcaaaaaaaaaaaaaaaaaagttttcacacaccaggctttgaaatcagacacaccagggttctagtcctggcttctctgccacacaccagttgtgtgattttaggtaaactgctcaatgtctctagcctcagtttctccatctataaaatgggcttaataagcagcatgcagtatcaatgggattactcatgcagagcattcggcacacagccaagcactccatacagggaagctgcgataacggggatcattcccggggggaccccaagacctgttagccctggtccctgtccccaggtgcatgctaccgttctttctggaagggagctgtccctctaccattcaccttgtctgccccccacccagtcggtgacctgtaggtcacacgacaaggtgcttagccttgctgagcctcagtttcctcgtctgtaaaatgggtccatctgtaaaatttctaaagtctgcattaaagattgtcagggtcattaaatgaacacacagcgtgtcaatcactcgggaatcagttgctgctgtggcttcaccataaaggtcgacaacagcaactacgtggatgtccccaagcattttccccaacatcttattatgaacattttcaaatgcacaggaaaactgaaagacctttacaaggaacacacatatatccgccatatatccaactggattctatcattaacatcttactattcttggccaggcacagtgggtcacgcctgtaatttcagcactctgggaggccaaggtggaaggatcccttgagcctaggagtttgagaccagcctgggcaacatcgcaagtcttcgtctctacaaaaaatacaaaaattagccgggcgtagcagtgtgagcctgtagtcctagctactcaggaggctgaggtgggaggattgcttgagcccgagaagttgaggatgtagtgagctgagatcgcaccgctgtactccagcctggggaacagagcaagatcctgactttaaaaaaaaaaaaagaaaaagaaaaaaccaaacccaaaaagcctacatcttactattctttatatatgtacatatataactatacatatataaattagagatgggggtctcactatgttgcccaggctggtcttgaacccctaggctcacataaccctcctgcctcagcctcccaagtagctaagactgcaggtatgtaccaccgcacccagctaaaaccttgaaatatttctattaagatttttaaggactcggtt
